United States Patent Application Publication US 2023/0172999 A1 - sequence listing, part 10

SEQ ID NO: 11 - DNA, 3257680 bp, Barnesiella intestinihominis (residues 1,628,841-3,257,680 of 3,257,680)
  misc_feature (53602)..(53611): n is a, c, g, or t
  misc_feature (701076)..(701120): n is a, c, g, or t
  misc_feature (880193)..(880209): n is a, c, g, or t
  misc_feature (2073083)..(2073092): n is a, c, g, or t
  misc_feature (2165976)..(2166121): n is a, c, g, or t
  misc_feature (2440519)..(2440528): n is a, c, g, or t
  misc_feature (2441154)..(2441163): n is a, c, g, or t
  misc_feature (2452509)..(2452518): n is a, c, g, or t
  misc_feature (2952383)..(2952392): n is a, c, g, or t
  misc_feature (3241554)..(3241563): n is a, c, g, or t
agtatgtgtaatgaacacccccggacaaaactccaacgctgtggccgagctcgtattcggtatgactatcttaatgatacgaaatcatttcaacggaacatcgggtacggaattgaaaggaaaaaaactgggaatccatgcttacggacaagtaggacgtaatgtggctcgtatcgccaaaggattcgacatggaaatttatgcattcgatccttattgccccgacgatgtgatgaaaaaagacggtgtaacgcctgtcgcatcggccgaagagctttataaaacatgtcaattcgtatcgctgcatatcccggctacggccgaaacgaagcaatcgatcaactactcgttgctttcgcttatgcccaaaggagctcttcttatcaacacggcgcgtaaagaggtgatatacgaagaagatctggcacgcatactcgaagatcgtaccgattttcactatgtagccgatgttgcacccactattgccgacactttaaaagagaaattcggcaaccgaatattcttcactccgaaaaaaatgggagcccaaacctccgaagcgaacatcaatgctggtatcgctgccgcccgacaatcggtcggatacctaaaagacagcattgacaagttcagagtcaataaataacattgttgacatatttccgaatcccctaagtaagttcttaccaactcatgtacttaggggattcattcttcaccaacaacatcattcaactatgctcgacagaataaaaaccgttcgttggcaatccatcaccgaaacccttttgaatgcgttcaaacgatttccagtcgcagcgacagcaacaatagggttgtgtatttctctgctattactcgtcaacctcccctatgagcaagtaaaaggaagtatactctacgaacccgtttattggtacgtatgggtaggtgcattacccctcgctgtaagtatcgtcctcggcttcgagaaccgcttgaaccccactatacgacattcggtatccctactcgctgtactattatggagcttgtatggctatctttcgaacgatactcccgaacatttcttcggaacacttgctttcatagctcctatcgtaacatttttttcggccttgttttgggctgcctttttgaaaaagaacaccgatacctctttttggaatttctcctatctgttgtgtatccaaatactaacaggcctactttttacatcggtcttggcagccggcctctctctggcgttattttctatcgatactctgttcggctgtgaattcaaaagcgagatgtattcaaacatacatgtgctttgctataccttgttctttcctttctatctgctaggcaacattcctatcgcctcgacaaccgaaacaaaggtgcgtccgtttgcccaagcatggaaaattctaggtttatatatactattacccctcctcatactctacggaacaatcctttatgcctatttaataaaaatcataattcagtggcaacttcccgatggttgggtctccgcactggtctccattctcaccataggcggagcaatcacactttttatgctatatccgttatgcccacaagagaatcgtcccctgaaatttttcaggcagtggttcggtatactgcttctcccactattaatcttaatgactatcggtataatccgacgctttcaagactatggtatcacgaccaaccgcctatacgtactactgctcaacttttggtgctatacgactgccttgtataccatttttacatctggtaaaaaaataaaaatcccgttcatctcatttattcttcttttcctcatctcatcaatcggtccgtggagattcagcgaaattacccggtataccatgcacaagcggatagatacactcattcaaaataacaaactcgggacaaacaatctacttacattcgacagtttagaaacccaatgcacccagctcgactctatcgatgccacccgactacaagacgaccttctctatctcacagagaattatggggcaaaagatatacaagtctggttcaccgattccgtttcctcgatgcaattttccaaactcacacaagggataacatctgcattgaatcgctcacaggaaaatcatcgcatctatttttcctactaccaatcggattcttacgaaggcaaaaacataaatataaaagattaccaatacgccctgtttttcgatgaaaattcaaatatccgaacgaacaacggcaatgtagaaatattggggccagacagtaccgttgtcgccgtttatccgctagtcgacctactaaaaaaacaaaactacaaagtaaatcccaacgacacagtttggtctttccgaggcaacaatacatacatacttcctctgtctttggacggctatatgaacaacccgcaagaaattggagggttatatattaaaggcatcgttttttacaatccataaaataaaggggctgcctgagaggcagcccctttattttatcgtagaaaaactatattattccttattgtcacccatcagtcctttccaaaccattgcagacaacgcagctccgaaaaacggcgctacaatgaacaaccacaactgtgaaagagcttctcctcctgcaaacagagccggagcaatactacgagcgggatttaccgatgttcccgtaatagggatacacacaatatgaaccaacaccaaagtaagaccgatagccaatcctgcgaaattgcccgctccttttttctcatcggtcgcacccaataccaccaatacaaaaataaacgtaaagattgtctcggcgatgaatgcctgtaacatttctccgtctccaaaactattggctcccgtcgtagtcactcccgatgaaccgcccgtagaaaccaaagcataaataatagacgatccaataatcgctccgattatctgaaagaccatatacatggcggcatccttcccgttcattcgtttagacaaccatacacccaacgtaatagccggattgatgtggcaacccgatataccgccaatcgtataagccatagcaatcacagaaaggccgaatgccatagcaacgcccaacgttcctactcccgcaccgcaagcagctgctatattgcccgcaaatacagcacttccacaacccatcaacacgagtaccatagtacccaccatctctgccaaatactttttcatgattttaatgtttttctggtacaatatgcacctattagcaaatttgttaataaactatataaccatttaaggttttctattacaaaggaaaaaataaattttgaacttcccaaagatttctattttttcgtatttttggaatcattttcaaataagcgataatctacaaacaagaggactatcatcaaatatcaaattaattatacgattatgaagataacagaaattacaaatggtatacattatgtaggagtaaatgaccggtgtaaatataaattcgaaaatctttggccgcttccatacggagtatcctataatgcttacttgataaccgataaaaaaaatgtattaatagataccgtggatgccgcttataccgatagactactcgacaacatagccgagattatcggggacgggaaaatagattatctcataatcaaccacatggaaccggatcattctgcctcgatacaatttattcgtcaaaaatatcctcaaatgacaattgtaggcaatgtcaaaaccctcgaaatggtcaaaggatattatggaatagacgacaatactctttgtattaaaaacggagaatccttgtctatcgggaaaaggactctcacatttcatcttacgccgatggttcattggcccgagacaatgatgacctacgttaacgaagacaaattgattttttcaggggatgccttcggctgcttcggtactttggacggaggcattacagacagtcaattaaacacggataagtattggagcgagatggtgcgttactactccaatatcgtggggaaatacgggccagccgtacaaacggcactgaaaaaactatccgacatagaaatcaaaacgatttgttccacacacggacccatatgggaaaaagaaataaccaaagtcattggcatttatgatcgcctaagccgatatgaaggtgaaccgggtgttgttatcgcttatggcagtatgtacgggcataccgaacagatggccgaagaaatagctcgtgaactagcagccaacggaatcaaagagattgtactccacaatgtttcccacgaagacccatcgtatatcctccaaaacatattccgctaccgggggctcattataggcagccctacttattctaacagattatttccggcagtcgaaaccctcaccgaaatgattgctacacgggatatcaagaatcgcacgtttgcctatttcggttctttcacttgggccggtgcggcagtaaaacacctcgccgcattcgccgaatccatgaaatgggaaactatcccctgctgtatagaaatgaaacaaagcattactccggctataaaggagcaatgtagaaaccttgcacaagaaatggcagctcagttaactcgatgattcaccaaatccaataaaagaacgggaaagaataaaattctttcccgttcttttatactcaaaatcatttctattaactatcactttttctgaacaaacgtttataccacggaataacatattccgaccgcgaagaagcatatccataaccatattttccgctaccatattggcgatatgaataagtccttgaattcatattcacatcattcaaaataagataaaccggcacattgatacgcttattgtcaatccatgcattcaacatctcgatcgacgctttattcgtatagttagccctcgctacataaataaccacatcgatagcccgggtcaacaaaaatgaatcggataccatacccaatggtgctgtatccaaaatcacataatcataatgggatcgtgcataatcgaccaactgctcaaaacgagaactcatcaacaattcgttcggattaggaggaacaggccctgccggcaaaacgtccaaattagaatcaattccagaagattgaataagagccgaaagatcagaatctccacccgacaaataggtagtaacacccctcatattggacatttggaaatgctgagccaaacgaggacgtcgtatatccacacctatcagaagcacccgttttcccgttagggcaaaactcaaagccatattgcaagaaacgaatgtctttccttcatgcattaccgacgatgttaccgctatcacctttttctctggaccagtaaggacaaactgtaaattattcctcaacaatcggaatagttcggcaatgggctccacactctttttctcaaccacaaaaaatttatttcccggcttcttagatatctcagccaaaacaggtatggaagtaagacgttctagcattttcttatctttcaacacagggaataacaacattctgaggtaaatcacaaatgccggcaacaaaacgcccaataaaacagcagcacaaagcagcaatattttcttaggagaaactggttctcccgtagaatccggatcgtcgataatgcgtgctaccggtacggtcatacttttggccaatgcattctcttctcttttttccaacaagaatacatacagattatcctttatcctttgctgacgcataatatcggataattcccgctcgtattgaggtacgttcttaatcttgtcttcgataatcttatcctgacgggataaatctctctttttaatttctactcctttacgaatgctttcgacacctttcagtaccaatgacctttgagtctgtatatctctcgtcaactcaacgataacaggattggattccgatgatgaatgcaataatctttctcgttgttgcagacttttattatattctcctattaatttagctaaatctttatcgtcaattcccaacgcaggaatgggcatatattcattttgaggtatcgataaaaatttctctacataatcgacaagacttttctgcaactccaactcagccaacttctcatcggtaaatccggtttgctccaaatataatttcgcctcagacgaaatatcaatcaaattattatgacggcgatattcttctactcgcgcctctacaaccgataaatcttttgaaatagaatccaaacgagcatcaataaactgttgcgttttttcagtcccttgatttttttgcttggccgcatcgatattataaaaatcgaccagtgtttttataaaatcctcacccgcttttattaccggagttcggtatacgaccttcaaaatcgttgcatctttcgaagcaaaagccactgtcaaatttccggcaatagacttactcacgcttctcggattcgataaagatatattcaacgttttatccacggtaggaatcgtatcgccagtatatcttagtcggataaatcccttgtgaaaaggtatggaatatggaaaagtttcgaccgtagtgttacaaatttctacctcatcgcccctcacatttcgagtcttcacctccaaatggaatactccgttttgcggttttattctaatattcaaagaagcctttaacgaacgcacatcaatcgaatcaagaactgcttctatcggagtctcttcatacaatggaacatttctcaaaaaagaattccaagaataagacgtgtacaaattaagagcttcgacgacatctgtaatctgatttttcgaacgtaagacttctatttcattatctatatttttcttataggaagatagtcctagactttccaataatatattgctgttatctcctttattgtcttgaatatatactgcagatgtgacttcataaaccggagtctgcctaaaacaataaaacattaccgccacagcaagtacgaccacgctggccacaaaccatttccaatatgaaatacattccaaaaagaagcccgtaacatcaaatgcctcttccgatgcatttttcacagatgtattctgcttatcttccataaaacttttatttcgaaatactccaagctgtaataataaggttagcgatagtcaataaaattgaagtcgcactaaaaatcaatgaagtcgtaggaggtacgacaacagcagaattggctttggatttgtttggttgaacatacaatacatcattctgctgtaaataaaaataaggcgaagatatcaaattcttatcattcaaatttattctcgctatactcttagttccatctgagtttaccctcaccaacagcacattatcccggcgacctgttatagccaaatctccggccaaagcgatcgcatccaatatactcactcgttcgttttctatggtaaacaatcccggtctattcacatctcctaataccgatatagaaaagttttgtatccacacagtcacttggggtagttcattcagatattcgggataaaggagttcttgaatcaaatgttctacctccatcttactttttcccgctacgtgaatacgcccaatcaccgggaaatcgatattacccgcctgatcaatcaaataatattcaacggctttcgatgcatttcctcgcagataagcttctccttgcatcaacctcttgttaaacgggataacaacctcttgattcttagccactaccgatatatctataatatcccccggagctaaaacaggagaagactgaaccgtcgcagcattcaatacttcggcaggtatatcttcaatatcaaccatatagggaacattcttcgaagaagaacaagacgttatcccccaaagaagtatcataaaaaacgtcaaatacaaatatctcattatgtgctctgtttctaaataatggcccaattatataatcgccatgcaaaaataacactttttacatggcgaacaatatttttatcagaaaaaccacgattcaaacgcgattcatgacattgcacaacaaagcccgttccctcttcactatcgctaaacaaagagaacgggctcaacaataattcccctttttcagaaattatattgaatcattgcattgattcgattggcctgaccatcttccctattcatattggaacgacgaccataaagatattcaagtccaatactacaatcgggagttaaattataaaaagcgttcccgacaatatattgagcatatcgataggaattttccgagagcgacccggttttgctgtataatctactttgactataagatgccgaaataaagaatttttgagagaatgaataccgtatgccagccacatagcctaatgtttctggtgcataaagtttcccttgattattgggatctggaatcaaatcgaaacccttcccgttcaaaccgttcaagtatctatcgtatcctcgtccataaaccccttgataatacagcattaccttcggtgtaatattagctaatcccgaaagttgcacggcccaacccaaaacagatttatttcgagaggccatcaaatcccgataggacaaacctcgtataagaccagaaactcgtatatgattgttcccttcgttccaaccatactggacataaaacggaatatcgggcatacgctgacgaatagccatattgttaccatcacttagcgtataagtcaccgaaggtgcttcggccgccagtgccacctgccaatgtttacttaaatcaagagtataacgcaacataacattacgcacactagtcataccatttggaccttcataatcgattgtaggaggagctgctgcgggatccacaaaggtactccaagtctgtccgactaaaaagccgcgggcattcacataagcctgtctgagacgaaaaccgtaatcctgtcctccccgaaaatcactttctacataaacggtatattttcctaatacagaattggccccgactaatttcaaaaacagacgtgtggtagaagcatccatttgatactgattacgttccgccggattacggggaacagggatatcgtatgtcacaaaatcccggttaggcagagccccgtcaaaatcataggaagcagtagcctttacataaccacctatacccaatgccgcacgccctttacgatctatcagcaaaaaacgaggggctcgcgggtcttggaaatgcaataaccgagtgtcgtaaaacatcgccatcaattcgtcattcggtggggtttccccccacaaaagaattactcgagccggcgactgtgaagggccttgacaaacacactcttctacaacgacatcggtctgtttatccattttattatcagcctgtaccgataataatgccgtcaccaaaaaacaggaacaagaaacaaataattttttcatactttcttgggatttaaacgtttcatcgataattaaaacaacgaggtacatgaattgttgaaacaatcgcaaaaataagtacctttgtatcttgaataaatccccataattatggaaacaattactttattcttaacccccgaattcgatacgatcagggacgaaatgggctacgatgagaacgacgatttcgatgcctacgacattctattccaacaaggttatgacggagaaatgatagaagtagaagaaaatgaaatcttcgaaatcccagaggggtacatagcgaccatacaagcaacggatacgaacgacgaattttatatactcgacgagggagaagacgttttcgagaaagaagatttccaaacagaaacattacgagaaggacaatatcgatatgatgccgccgagaacattttctggaaaatcaacgacgaaccaagcgacctctccttttaactatttacgataaaaagatgaatccacttcaaccagagatacaccccctcgccccatttcttccacccaatgcccggctcctattgctaggaagttttccgcctccccgcaagcgctggtcgatggattttttctatcccaattacaccaacgatatgtggagaatttttgggcttatcttcttcgatgacaaagatcattttgtagatatagaaaagaaaaaattccgtaaagacaacatcgaacaatttctacgggaaaaagccattgctgtaagcgatacagtagccgttgccaatcgcctaaacggaaatgcctcggacttaaccctcgaagtcgtcgagccattaaatctggccggaatgctcgatcaaattcctctctgtcatactctggtgaccacaggacaaaaggcaaccgacacattactttctatcacaggttcatcggctccggcgatcggagggttcgtcgattttctttaccataatcgccacctccggctttatcgtatgccctccacctcccgcgcttatcccaagcctctaaccgaaaaagcggaaatataccgtaccattttccaaaacttcgagcaatagccatattaaaatacgattacattttcacaaaaattcaaatttgtaacacgaatatattacctttgcagccataaaagtgcaaattttataatccttttttatggaatcattatctttcattcagtggtgtctcgataatttaaactactggactatcacattcctcatgatgatagaaagttcctttattcccttcccttccgaaatcgtcattataccggctgcatataaagccgcttacggagaattaaacatgtatttggtggttatcttcgggactctcggagcagacctcggtgcaatcattaattactatttagcccgttggattggacgtccgctcgtttataaattcgccaacagccgcatcggacatatctgtctgctcgaccagaaaaaagtcgaaacagctgaacgctatttcgacaagcatggtagtatatccactctcatcggaagactgataccggccgtacgtcaacttatttccataccggcaggattggctcgtatgaaattctccaaatttattcttttcacgactcttggcgccatgtgttggaatatcgtattggccgccataggatatggattccatgctgttatccccgaagacgaacttgtctcgaaagtacagatgtatagccacgaaatactctacatactcatcgctatttgtgtatttatcgtaggatttctcatttataaaggaatgaaaaagtcgaaataagcatatttccacttgtaaaaatacgaacagctatgcgataatcgcatagctgttcgtatttattgaatgatacaatacataggatatgactacacagaaccaatgacccacttttccctcttgcatcccatcaataaatatctatctttgcaactacgaagataggattcggttaggcatagccaaatcggatacaatatttccgtttgtctctacacccacctttcactatctttgtaaaatcctttgaaaatgaaaattcgatacacaatttagagaaacggtaatcatgatagaaaccgaactttgcactttcacactcgaagcctgccaaatagccgccgatatgggtatcacccgtgtagaactgtgtgcatctccttatgagggaggcactaccccatcggccgcattcattcgcatggctcgtcgaattcctcatttaaaactgagtgtaatgattcgtccccgtagcggagacttcctctactccgacaaagaatttcaccaaatgctcgaagaaattagttttgcccatgactgcggagcagattgcgtggtagcgggaatactcacttccgacggacgagtagacgaaatccgcacagcagaattggtcgccgcagccaaagaaatggaatttacattccaccgggctttcgacatgacctgcgataccaacgaagccctcgaagccctcgtgagagtcggttgctgtcgggtactcacttcgggaggacgtaacacagcaccggaaggaatcgagaacattcattcgttagtcaaagcctccgcaggacgaatagccgtaatggcaggaagcggagtgaatgcatcgaacgtcaaactgcttgccgacaccggagtggatgccatacatttcagtgctcggaatttaacagaaagccgtatgacctataaaaatccgtcgatctcaatgggcggagtacaggggattcccgaatatgcatcaatcggaatcgacccaaccatgattcgtaatattctgaaccaactaatctaaaaacgactctcacatgagaaaagaagctccattttttctactgcttgccgggttgatttgctcactctctgcctgtacctctggtatctcaaccgattataaacgacaactcgaaaccgttttaaaccagtcgtctcgtgcagatagcctaagattactattacacaaaacgccacacgacgaacaagaagcgatggcttacctgatagtttggatgccacagggagaccgcgacacgatgaatctcgatcttttaaaagagaacgtggcatatgcctgtcgggttcggtctgaattttcatggacaaaagcactacccgactctatcttcctcaacgaagttttaccctatgccgtggtagacgaaactcgggactcgtggagacaagatttttataatcgtttcgctcctcgtgtagccaaatgcacagacatacgagcggccatcgacacaataaaccgaattatccccgaagtggtcggagtggaatacaacacgcttcgggaaaagaccaaccaaagtcctgctgaatcaataaggcaaggcatggcttcctgtaccgggttatccattcttttggtcgacgcatttcgctccgtaggtattccggcacgttttgcagggactgccgcttggcacgacaatcgaggtaaccacagttggacagaagtttggatagatgggacatggttctccacagaatattatcaacctcctgcactcgacaaggcttggtttatggctgatgccgggaaatcagtatcgggagaccatacacacggaatttatgctgtatcgttccgacctacgggagactggttttccatggcgtggaatgaagatgcacgcagtgttcatggtatcgatgtatcgcaacgttatcgagatatatacaccgaatcgacccaaatccttacgaaacaagggacccatacgaacgtgactttcatgatgtttcgagataaacggcatagctccgattccggtgatcgagtagaagctagcatcgatgtattttgcaatggcgtacaagtgggtggaggccgcacagccggtcctttgcaagatatgaacgatgctctgagtttcttattggaaaaaggccatacttatacattcgcctacgagaacagccgaggtgaaaaaacaacggttgaagttttagtaggtaacgacccgatgacggtcaaaggttatatgcaataatctgataacagattaaacctcccggagctgaaaaaacggctcagtagaaaatcagaggggattgtggttttatacatctaacccctctcctcagaaactatcgtttcttcggtctctcccctatattttacgttgcaaaatacaggggagaaatttagaatattttatattatcgtatagaaaactcgtcggattgtaacgaaataaaaaatgttccaccctcctcctctgcacacgaatatgcgataggggctatcccatatatttccttttacaactgcttcaatcgagcaatcgtatcgataggattatccgagtggaaaacaaaactaccggcaaccaatgcatcggcccctgcctcaactaattgccgaccggtatccaaatttaccccgccatctatctctataaccgcatgcgaatttctacgagcaatcatctctttcaaatccctcaccttatccaatatgcgaggaatgaacttctgcccgccgaagccggggtttaccgacatcagcaaaaccaaatcgacatcttcgataatatcttccaacaaggacaccggtgtatgaggattcaatgaaactccggcttgcatacctgctgcatgtatctgctgaacaacccgatgaagatgtgtacatgcctcataatgaaccgtcatgatagctccgcccacacgcttgacttctggtataaacttttgaggctcgacgatcatcaaatgcacatcaagaggttttgcacatcgccgattcacaaattccaacaccggaaacccgaaagaaatattcgggacaaacacaccgtccatcacatcgatatgcaaccaatcggcggcactagcatttatcatatctatctcactgttcagatttccaaaatctgccgacaacaacgatggagaaattatcacactcatattttttacgtataaacgattttttcggtatcatacagacactccgtctgctttcgtatttcacacaaatataatacagagcaaatacagaacaggtctgttgagtttcaacgaatcttaactctcgtcaaaggtaatacaaatgagagcaaaaacaaatttatttagcattacagatagcttccataatcacattttatacaaacgcagaattattcgatatatcctcgaaaaaaatattgagaaactatctaatttactttatagagtctatccatttgcttacgaacttttccgctaacagatagtttattaaacaaatagtcttgattttcaagagccgatacaatataaaggtcttcgcctttggaatattcattaacttcgtcaatcgcctgaaccattccttgtatatcgcctttcggaatttctcgggtgtataatgtcactcgcctatcgccttttaataattcatacgtaaaattctcacaaggcaactctctaaattcatacccttcttcgagcagcaagttgggaaaataaaatatatcttcccaactacatgccaataaattatagtcttttttctcatcgaaccatttttttactgcaattcgcttaccctcttttaccgttttatattcatgaatataaaacgggtaaaataaattcccgctaagtaacatatactcgtctaatgtcggtatcagttgacctacacccactcctatcgtgacatgatatttcgtataattttccctacaaagttggacataaggacctaatttcgcatccgaatcaggaacatttctccacggcgagtcgggaaagtctattcttataccgaggcataaaaacaaaactacgatagaaactataccgtactttaaaaccggtttccctttgaccctctcatatatccacctcatagcatagacgcttatgagagaaacaaaaggaatcaaatataaataatgtttaggcgcacaccctgtataacgaaacataaaatgaatgagaataataggaatcaacgctatccctataattccaaacttcttttcccggaaaaggacaaccaaacccatagggacaaaaacaaaattgagaatcgtataaaacgtaaataccgcaaactttacttgcgaagcgaaactgtgtgtttcattcataccgttataaccggtcaatgcggttaaagggtttgcccgcagcccccaatatccaatcgtcacaaatagaagtatgagaacagctaaaaataccgatctcgttatactctcttttacactcttcctttgaaataaaaaaataaaaaataccactggataaactatcaagatatctatcctatataaaggagcgattaccatcaacaccattgccacataaaactttccatctaataacctgtttagagcgcaaacaaaaaacacagccgcaaaaatcgccgaattgggatacatcgaaatggcaaaagactctggaataagaaacagagaaagcaaaataaatatttttctaaaagatgtaatccgataaacgaaattcacactttccacgataaatagagccccgcatatggcagacagcaaacaatagatttgttcacatgtcaaaaacggaaatatatatttgaatcctaccaccgtataggttaccaacggttgcatttcatataaataagaatatactggcgggaatgtaagtccctgattatacatgatattacaccccgcaataacatgcatactatctgattcataacatgtcaacgggaaaatacctatacatatccatataaaaaacaatactaaaacaataggataactattacgggacacaaatttccaaaaagaatcgaagaaatatttccaattactataaaccgacataactatactataaatttaataattatagccctattctataatattaaacaaatatatgaatctcgttataataatggaaattaaatagtgtcaatttttttaccaccacggctactacaagaaaaaatgaagcgacaaagcactattaaacaatatcttatcctaacacaaacttttcaaaggaacgataaaacgatcacccaccagaaaatcgacacaataaataatatttaaatacaatattttagaataaacagtatctaaaattcaaaaaagtagtatatctttgttgttattaaaactaatttagttttatcacaagatcttactaatattaaaacacatgaaaaagaaccttacgctcttcgtttttatagtgataggaattttctccgtcacggccgcggctcccaattggggcgtagccgacacattggaacactacgaaataggtcccggtatagagtatatcaaaatcagatacgaatcggttcccctcacactgtgggcgaccactatcgacatgaccaatccttacaatgtaattgaacaagtacaatcgaacaactccgttcctgatttaaaacgggaattggtacaagacatgtcaaagcggctaaccaccccggggcataaagtatgcgcggccttcaatcatgactttttcagttatgacgaaggcgtctgtatcggactaaacattagcaacggcgtcatctctatgccagcaggtagcggaagatcgacatttgctattacccaagataaaacggcatcggtcttttttcccgttccagagtgcaaagcaatttcggcatcgggtgacgaagtgacaatcgaccatttcaactggggcgcagaaacaatccgcaacggagattgcgtcctgttcacaaatatgaactcgctcaatctggatgccgagggaagatacataaaaatacgcccccgatccaattggatcgtgaatgggactcccacggtatgcgatgtactcgaagtctcggatttacccctacaaacttccgacaccgattttgttctatacctccgtaatacaaaactgaattcactccccgatataaaagtgggcgaaggaataaccatctcgcaaaaattagttgccggaaaattcggaacaccaccagacaatatcttacaagcattccacggataccccagcatagcctatgaaggaaaactccacgacggagaatataatgactttgaaaacggacgggaatatgaaacttcttgtcgcacaatggcaggcatgtcacaagatggaaaaaccgtctatttcgtagctacggaattatcggaaaatagtaccggtatcaactgtatcgacatcgctaattggatgctggctcatggagcttggaatgtagtcaatttcgatagcggtggctccaccgccattgtcgtcgaccacaccatgctgaaccttccgggaagaggatctttacgcccggttatggacggagttctccttgtttcaactgctcccgaagacaatggcgtggcccattattcattctcaaaaacacaattaaatgtaccgataatttcccttgcacccctcaccttaatttctcaaaataaatacaaagatgtgatcgaacgcaacgtagaagtagaaggtttcgcattccgatgtgaaccggccgaattgggttgggtggacaaaggagctgttttccacgccggagaaacggtcatgtctggcaaaattatagccgagaaaaacggaatcacggccgaacttcccgtttcgacccgtccggtacaagacatacatatagcagccgatgaaattctcatagacagtgtacgtccctaccgaatcaatttagaaggaaacatcaacggtcaagtatatacgctcgacccggccgctttcgcatggacctcgtccaatccatcttgctgccgtatagaaaacggtatcttaaaaggaatagaaaacggagaaacgtcgctcgtcgggacactcgacacaattaccgtcggcttaaaggttatcgtcgaagtaactccggagactcttgtacacgaaaatttctccgatctatcagactttcctctattctcgaccgtatctaacacgctctcaatttctcacgaagaattaccgaccggctggccaaatggagccgtattgcagttcgatcaaaaaacaggaagaaacccttatgtagaaatgggtaaaagttatcgtctatatagtttacccgactcaatctccctacaactgaatttgtcgaaagaagcactggcagccatcaaacatatccgttttgatttcacgcataaaaacggaaagagctactggcaacccgaatatattccatcggacacgggcgatcaaaccatcgcatgggctttctccaaaaacggcatagcttttcccactgaggattttcctctcacattagatagaatacggttcgtgctaaatccgggcagccgttctgaaatcacgattcccctgcgggaactcaaagcctactatccagtcaaagcaagttccgcgataaataatgtacatattgagaataattttgcatggatcactgccgaaggagaacttcgcctccactataatttgcaacaaaccggtagtgccgatatttctatttggaccaccgcaggacagcaaatttccgaatatatctccaaccgagaacttccgggaacttatacctataatatcccagaccgattcctttctcccggaatatatatattgacaatccgagcaaacggaaaaaaccaaagtctaaaattcagggtaaaataagattgttttttatcgataagggatatttccattggaaatatcccttatcatttatctcaatgaaataaaattttaactcataacaaatctactcacaaacgagaaacaggctcaaaatcaataataaagaaactttcccctttaaacaataaaccacaacagcaaatttagaacgggttattgggctcggcaaaatcgtaaaatgttccataattaccacgacgaggagcccccggcatatccggataaaaattaggacattcctccaccttagccttcaatttagcataaatggtcttaatttcgttactacacgtatctatatcaataggatgctcttccataaaatctgtttttgtattatagaaccggccatcccaataatatttccactcagtggtgcgtgcagcacgagacgcataaggagccgcagccacaggccataatggattatagtgcatcaaagaaatttccttttcaagaggtttttctccaacgatttccgggaaaagactcaccccatctaaaccatattcttctggtactgctatacgcatggcatcggcaaaagtcaggaaaaaatcagtaaaatcgaccaatcgctggctttccctcggctctaatttatctccccagcatataatcaacgggacagaagtacctataccccgagggtctcctttaccgcctcgacgcaaagtaccatcggccatttgtgaaacaatacgcgtagaagtcccattatcggacgtaaagataaatatcgtattttcccattgtccattacgtttcaaccgatcgatcatgcgccccactttcttatcaagataagctaccatatctttgaaattagccgtatctttctgaaaacgacctgcaaaatccaaatcccaactctctgaatcgggggtaggcgtgtgcggcgtatgtactaagggagtagagtaataaagcaaaaatggtttatctgaatctttctgtttatccaaaaattcaaaagcggccgattcgaaaccatcagggccataaatcgaatactcataatgaccgtgattatccatcatacaattggcataacgatctgtaccagtcggaccattgaattctttatatacttcaagttgaaacaaacaccactcgtcccaccccaaccgggtcggcatctcacgtgaactccccaactgccatttaccaaacataccagtcgtataaccagcctgctgtgccaactgcgagaaagtaggctcatcgtcgttcatatagccaaaacaaacataatttttatcgttatacaatccagtcataagctgtacacgagaaggagaactaagaggttgggcatgcatattcgggaaaaacaacgacttttcagccaaagaatcgataatgtgtgtatcatacgacacaccacccatacagccgaaacactcggccccgatatcatctgctaaaaacaaaacgatattgggacgtaccccattttcaatcgaaccatttttgtcagtacaaccactaccgacaagtgaaagcatcgaaagccctgtgatttgaagttttcttgaattgatcataatagttttgatataagattaagatttccacaaagataaagttttttttacacttcatcgtttacactaaaaatatcttatcctcatacacatctatttatccctcccgagataatcgataacaaaaccggtgatgctcgaaacaaatatcgagaattccaaatcgtacaaaccgagcaatatactctatcgccaaccgataagaaatatgagccaaccggctatatttactaactgttatttcttgatgttccgccaaataatcaagtaacaattgttctcgttcggtatatttcacaagagttccctgagcgctgtttttctgtcgccacacagccaaatgcacaggtgttgccaatatattctcgtcggcaatacgcacataagctaaatactttccggtttcgtcctgcacttgcacgggcttttgttcggctttcggaatctctgcaacaagcaccgttttaccgtccacttcataagtctgcacacttatctccacattaggccggcaataaagtttggcagcagcctctatcatataaatctcttcttccgaacgcaccccggctattcgaccgttgtccttcacacctatcaataaacgtcctccgtccgtattggaaaaagcagacaaggaacgggctatttttcgagcatcggaaatctcgaatttaaaatcctgctgctggtgttctccttctgcgataagttgttgtaaatacaccttgtcggaattcggtctcatggtttactctattttttcattaactgttgcaaccgataacgaaatcgtagccaaaatagaaatccggccgtaaacagccccgcaggaaatgcgacccacacgcctacgacacctccgccccatgtaaacccacacaaatagcccacaggtaaagcaactataaaatacgagaaaaaggcaatccacatcatgggcttgacatcggtcgttcctcgcaaagcattggcaaaagtaatctgcaaagcatctccgaactgataaacaatcagcgaaaatatcaacgaagaaacaactatcataacttcatggtcttctgtaaagctatatataatgggagtcctcaccaaatagaagaatagactggcaacaatggcaagcgataaaataattcccattcccgaatttacagctctacgcaaattggggaaatccttctgccccataaaatggctgacccgcacagccaaagcagcacccataccataatataccataaacccgatagtactgaccgaaatcattatttgatgggccgccaacggaatgctgcccagccaccctaccataatagcactcaacgaaaaggccgcagtttccatacccatttgcaaagcgataggccaccccaaagcattgagttgtataaaatcattacgattgaatcgagagcgtaaaatcgcctccctatatactttataccgtcgcgcaacagcaacgaccccgataaagcccaacagcataacaatacgcgagaccaatgtactcacacccgccccgaacaagccccattcggggaatccgaaacttccgtaaatcaacaaataattcccgaaaatattcaatgcgtttccacccaataaaatccacatcggtgtacgagtatcggtcaacccttccgcaaactgccggaagccgttaaacagcatgataaacaataaagaaatcagttgcaaaacaaaatacggacgtatgtgaggcaacaattcctctggctgtcccaacttatcgacaaagcaatagaccgtatacattacagcagtcaacaatactgcaaccgatgcattagcagccaaagcattacgaaatactcgtcctatcccttgtgtgtttcccccaccctgcaacataccgattagaggagtcaatccataagaaaaaccggtcgcaaagatgattgccagattgaatacattattcacgaacgcagccgcagccaactcctccgtactatgatgcccgatcattatcgtatcggccaaacccaatataatcatacccaactgtcctacgacaatcggtaaacctagtcttagcaaagaactaacctgctgtttataagggagtaattgcattgagctcatatcatacaatcttacaaaaattaaatgaagtgcaaagataatgcaaggcaagagaaagacaaagtgaacttgtttacttttctttctcttgccttgcattgccaatcttggacttttgtcaatcgctcatgtaaatcgaatacagaaacaacttctattcatttctcagaatgaaaatcggtatctatccgacaaatagatagataccgattgatagaaagttgtcataactggattatgcttaactgacttgaataccgactttccggttcaaagtcccctacaaactcactttataacaatgatcatttatatatacaaggtaaaatccgtgtatcggtaaatccagttcatgtttgcctattgtaatttgtctactaagtatcaacttaccctcgatagtatatattcggacaagagcatctcgggcaacccctacatataagattccgttatgagcataaactttatcagagtctataccatcaacattttcgatggaggaagagagtcgtacgatttgaggttctgaatactccgaatatacgttgggtccccaaattccttcttcatctaacgaataggaccaagaagctacagaataaagatattcatcgctttcagaacccgtaaggtcggtaaaggtgtacgaggtgttatcgataccttccacttcgaacgatgccaatgcagaagtataactctctccggctcttagaatttgctttacgaaaatatcatcgataaacattttatccgttcccgagaaagtaacggtaaaatgagtttgagccgacccattagtaaaatctacggaaaaagaatgctctcccacggttttcatcagatactcgcgatgttctttttcaccttcacaataactatccacatagacagtatcgccagcatgaatcgcatacacattcagttgcaccgtgtatttgccatcgttacgagacaaatcaaattcgggagacgtgatttttccttcctcaaaatcacggtagtaattatcgatacctatcattcctttaaccgtacaacccatattgacaccccaaccgggcactttgctatatttattaaggtcataatcataaaagtaaccgggccattcaaatgttccctccgtgatcgtttctaaatcctcgtgcaccagcgtgtattcttcatcggatcgggctgtatgtttcaaaaagtggcgcacggcatatcccattgcacgctcaacaggataccatcgagcagtatatcctgtatcggttatatcggtcggatcggctaattcgggcactggcatagtacgaatggggacatacacttgtacctcgttcgattcaacagaagtgtatttgtcattcttggcttttaccgtgaagaaataagtttttcctttttccataccggtaacttgacattcacattccgtcgtttcgatattctctgcaatatatacacggtgtgttttctcttcatcggcataataataagcagacgtaagataagaggttgccgaccacacggcatcccatcgagcggtaaaatgctcgaatgttacatctttgggtgagatcgcgtggggtgagcaaatatcgtacacgtcttgtatgatttcaatatcgtctatcagccacgaatcgttgtatgccccgatttgtacataggccaagcgactccccataccgaaattgtgctgaaaagggacttcgatcgtttgccattggtcggtgatggtgcatttctcactcgtatagtagttgttactgtattgatcttgcaaataaaggataagcgagtccttcgtttgggcaatcgaacgtgctcggaatcgcagtatgaagttaccatcgtccaaacgcacatcggtatacggcgtttgaatccacccctgtgtctccccatatgtatagtcatcataagagagtacagcgcaaactcctccggcttgatgaatacctcgtcctttccactgtatgccgtgcgtgaactccataggaatcattgcatttcctgtcgaaagttcactctcggcaggcgtggattcggttccttcggtaaaagccgaaaaatcttccgataaaatagcgagttgctcgccacgagcagcataagccgaaacaatgttgacacctaagaagatagtcaaacagattgatgtaatttttttcataagcaataatatgattttataattaggaagtgttctctataataatgaagaaataagttttaaacaaaagtaacgccgataattctttattaaaaataatcgacgttacaattaagccattatattgtattgataatcagacattttcaaatagaatattacaaacaatatttgttaaacactaactatcaacaatttacacatcaaatagttcctaccgatatttttacattaatttacttttaatccgacttttctgagtacggatagcatttagacttactcctttgcaaacagcacattctttggtattaagtccgcacttgaccaaacaacataaaaccgcctcatcttgcgttaatttagtatgttttttcaaagcatcgatatattcattaaaagctttgtgtatagactgcgagaccatctgtcgttcatcaatactcaataccgattccgatttcgcctcgatcatcgatttcatatttttgtatgctttggttcgcatgaaagataaagcacatacatcaccctttttatcgatgagtgattgtagttcttttcgctcgttatcgacctgccgggcgacgacattcgattcgcccatattcccctttatattaccctcatcgcactcgtgagctgtttctatcttttgacgcaacgcctccacctgagctttccacgctttatctcttgaccttcttttttgaatatacagaaataagataagcaaagctccaataataactacggcaatccaacgataatatcgagttttctcggtataaagaatctgctccaaatcatattgatattctgtctctcccattgactcggtacgattaattttttcaatagaatcattagcaagattcaataaatttacacattcttcatagagcgcaccgttttttgtttcgagagcaacttcgcaaagctgcttatagctattggcccttgtataaatattggggcttaaacttccttgccggctataatgatatgcagaatcatactgtccagataataaaaacatcttacctatggcagaatacgttcgatatatcaaagtactatccttagacagagaaatagctctatacgcgtgctttgtagcctgttcaagatctttgagttctccgtaaacgaccgacagattgttatgagcggctgtcatttccaaagtatccgaagcagcttccgataacgacaaagcttctttaatgtatccgagtgcactgtcgggactgttcttatacagataatctttccctacttcccgtaaagctcgagccgtatatttcgtcgaatcgttcgccatacattcttttaaggcgatagtatgctcttctaatgctctattgtacagatgatgcgtacgcagtaagtttccgagacgcaaatgcaacgcaaccgatagatccgaattcgggctagtaaggctcaatgcccgacgatataaatatgcagccgaatcgggttgaaaagattctatttcaatcccatagtcatataagcgtattgccttttcttgatatcgatcactgtggcaagcaaaaaaacaaaacaaaatgacaatataacatatacgggaattcatgagtgcaactgcttggtataagtaacaacaacgaaaatcttagcaaagataattttatcggccgggaaaattataaaatgtgaattaaaaacagcaaaaaagtacaatttatacaaataggtaaaaaggtgacaataaataccccagcaaacctaaggtacaaatcgactatgcccgaactctcctcgacaaacgaaaaccaccatctatccagccggataaaataacaaaaaaagagagagcccgatttttacacgataagctctctccttcaatttctatttcatcaattctttcagaacaatttctctgggtattcaccggcagcaatcaacgcatgaattttgtcgacaaccgactgcctgtcggcagcataagttaccccgaaccatttcgacggagtatcgagaaccgttacagaggccttaccagtttgaatcaaatcatttaccaataaaggtataaaatactcagctttaatattatctgcattctctttcaagaacttaacgaaatactcttcggaatatttgaaataatcgggtgtgaatccccacatattcatcgaaacaggtgcattgtcatcgatagcagtccaaatatccccttctttaaacatcaccttgccgtcgcgacgttctatctgagtacgttctacaaccgatgtaagatgtttctcggcattggtctcgcacacgccacgagcaacagaaccgctctcagacagcgtatttcccacacgataacccaccatacaatactcgtttttctttccttccagacctttcaaataatcggccaaaatagcaaaactttcgcgaccgtagaaatcatcggcattaataacggcaaatggctctttaattacatctttacccatcaacacggcatgattagttccccacggtttagtacgtccctcgggacacgtgaagccctccggcaaatcgtcgatagattggaataccaattcacaaggaatatgaccttcatatttagaaagaatcttatccttgaaatcttgctcgaaatccttacgaattacgaaaacgactttaccgaatcctccgcgtaaagcatcgaaaatcgaatagtccataatcgtttcaccgttaggaccaagaccgtcgagctgtttcagtcctccataacgactacccataccggcagccaatacaaaaagagttggtttcatagcagttacttatttttagttttccatgaattgcaaaagtaattattttttatgataaaaatcagcaatacaccttcaactttcacccaagtgttcctaaaacaaatattatctacctgttaaaccccaacgctcaataaagagaatccattttgttcacgagaataatgttaaaaatggaacgataggtcgaaaaaaattcctttttactttctgatttgaaaaaaaacatctttatttgcaacgaataataattatcgaatcactctaaataaagattgcctatcgacaaaacattacgcttgaatcaaaaaaaagagaggtagtaatgaacgatttattcgatcgcaccgacgaagaactggttgcgttgtatgccgaaggtaataatggagcttttgatgttttgcttaaacgacatcaggtccgtactttcaactacatttattatattgtaaaagacaaagaattggcgaatgacatctttcaggaaacttttgtcaaggctatcatgactatcaagcaaggacgctataccgaaaacggtaagttccctgcatggatttcccgaatcgcccataatctcattatcgattttttccgacaggaaaaagccgataattatgttatcaccgataatgaaaacatggatatctttaatcgcaaagaattgagcgaaggaaccgtcgaagatacaattgtacaaaaccagatcgaagccgatgttcgcaaacttatcaaggcccttccacacagccagagggaagtacttgtcatgcgttattacaaaaacatgagcttcaaagaaattgcagaccataccaaagtcagtattaacacagccttagggcggatgcgctatgccattctcaacctgagaaaaatggccgaggaaaacaacatcgtactgacattataaaaaaacaagcaggtacagataataattacaaggctaccgacgtttataatacataaacatcaatttttattagcctatgaaaaaaatctctacctctaaaaacacaacgagagtacaaaacgcaaaagtattacaaccaacggcctcgacaatcgattttattaggcaatttgccagagtatattcattcgattcccgattgccggcctcgttaggaggattggtaaataactaaaaagaaaaggggagcagataatctgctccccttttcttttctactctattaacctcagtaagaaaactttcccgtaaccactccttttttctcctcttttctttctttatataatactataattttttataaaaaaaagaatgtaagttttcttttttatcttataatattagtatattagcactgcgattttctttatttctcattactcataaagccctaaacaactgaatatcatgtaacaaaaaccatatttaacacgattattgtctccatactatttttcagacaagctatacattttattttaatttaaagttgaatgacattagttactcaagaagatagtgatttcacaaacatttttagaagttctaaaaatggatttatccagtttgcatattcctatcttgggaacatgcaagacgcagaagacgtagtcatggagtcctatatccaatattgggagaacaaggacaaagcgacgttccaaacttccaatataaaaggatacatctttacaattataagaaaccgatgtatcgatattctggaagagagaaaatatttattacaaaaaaacgacgagctctataaacacataataggtgaaatagaactcaatatatcctcattgaaaggatgcgatccctccgaactattcaccagcgaaatagaaaatatagtaaacgatactatcaaaacactccctaatcgcacccgtgaaattttttacgaaagatacctcgaacaaaaatcctacaaaaccattgccgaaaacttcgggatttcggtaaaaggcgtagaattccatgtcacaaaaagcctgaatgtcctaagaaaaaaattaaaagactatttataaaaattccgagccacgctgtaacgaaatccgactaaaataccacgaaaaccaaccaacaaactataaaaacacaaatccacacttcatttttctcaaaaaaattttattttattactagggatataccctgtttttcggtttatataatgtatggaaaagaaaacattatatagatatttcggaaattgcgcaaccgaagaggagcgcattcaagttttggagtggacaaaagcctcgcccgaaaacctcaaagagttctgtcgtgaacgcaacatatacaatgccattttattatcgaccgacaatatacagcgtaccaaatacgacttccgccgccactaccgtgcacaacttctacgtatcgccgccgttgtcatactattgttgtcggtagcattcggcagtttctatctcacgatgggcgatcgcatcgttcccctctattcattgaccgtaccggccggtaacagcaataccctgctcctgcccgatggtacaaaagtatggctcaatgcaggttctacgataaaatacccctcgtcgttcttgggaatgcaacgcaatatagaaatagaaggcgaagcctatctcgaagtcacccacaaccgttggaaaccatttatcgtaaatacgcctaacggaaaagttaaagtgttgggaaccaaattctacgtgacttccacactcaaagaaaaagacttcatggtctcgctcatcgagggttctgtaaaaatatcgtcgggcgaaaaaagcgcgatgctcaaacccggataccgggcacaattcaaagacggcgagttcaagcaatcggtaatccgcaccttcgaaaccgagctgtggaaagacggtatctactactttaaggacaaatcgttcgacgaattgatggaaggattcgaaaaatgtttcggtgtaaaaatcagtatcgacaaagacatcaaaagcaccgagcactacaccggtaagttctatcgctacaatggcattcaacatgcgttgcaggctcttcaacacgatttcaacttcgatttcaaatgggataaagaactcaatacaatacaaatcacttctaaacacaaataatatccaaaagcctatgaatacataaaagcacaccatctcttatctatcattttaaaatcaacaatttatttatttcagttacaaaacttttgaataccacaaaacacacgtatgtatagaaaaagtttaaaagcaattattgcagttttagcactggcttacgcattcgaagcaagtgccgatgcgtattcacgcatatccctatccgaggcaaatactccgatagacgaagttttgaaaaagatcgagaaagaagctcagtgtctgtttgttatcaacacccaagtggacacgaaacgcaaagtaaaccttaacgttcaaaataagacggtcagcgaaatactcgatatcatgttcaaagggaccgacgtttcttactcgatacagaaccccaacatcatgttgtcgaaaaaagccgcatctgcgcaaggaaatgtcgccagcgcaagtgcaacggctcaaagtgccaatacgaaaattataaccggtaacgttaccgatgcctccggcgaaacactcatcggcctcaccgtaaaggttgcgggaaccagtgtagcgacggcaaccgatatcgatggtaactattctatcaaagtgccggcaggaagcaacgaattggaattttcctacatcggttaccaaactatcaaacgccccatcaacggacaaaataaaatcaatgtagtgatgcaagacaacacgaagttgctcgacgaagtcgtagtcacggctatgggtatcgctcgtaaagaagaaaccctttcctactcgacgcaaaccgtcggaggcgacgagctcactcgtgcaaaagaagccaacctcatcaactcgttgcaagggaaaagtgcgggtctggtcatcacgcctaactccggcggagccggtggagcctccaaaatccttctacggggtaatgcgtctatgctgggtaacaactcgccgctcatcgtaatcgacggtgtgcccatgcaaaacagcgtggccggacaaatggacatggacggcggcggtgctacaatgatggtcgacggttcgaaagaaagtagcgatgccctttcccaactcaaccccgacgacatcgaatcgattaccgtgctgaaaggagccaactccgcagccctttacggtagtgccgcctctaacggtgtacttatgattaccaccaaaaaaggtaaggaaggacaaatccgtatcgatgtatcgagcagtacgacattcgagactcctctgaaactccccaagttacaaaacagatatggagcacaaatgtccgggtcagtcgaaaacggattcaccatgaactctaatagctggggacaacgcatgaacactctcggtgacgaatattacgacaccgcaaactccccctatcacctcacccgcaatgcttacgacatcagcgacttctaccgggtaggaaccaacttcaacaactccatcgcattgagcggaggtacgaaagtggcacaaacctatttctcttatggaaataccacagccaatggtatcgtcgaaaccaataaattcgaacggcacaacatctcgttgaggcaaaacttctccttcttcaaggacaaactaaaaatcgatatttcggcgaattacatcaatcaaaaaacaaaaaaccgtcccaccggtggtacgttcttcaaccccatctatcaagtatatacatcaccgcgtaacatcgatatgaattggtatcgcaaaaactattacgacaccagtgcaacatggcagtccaatccatatagctacatcgcttccgaaatcggagcagacgggttacccatatcggtgatacaatcgggcaagacatctaccctttccgatgccaactatggcaaacaagtttggtttaccgatgccatcaacctcaataacccgtggtggttgctcaaccgtatgaccagcgaagaagtgattaaccgcacattcggtagtattgctgccaactggcaaatcatcgacggcctcaatttgcaagctcgtatcaaatacgattacaacgaacgcaacgacgaaaaccgacaatacgccaccacatggggtaatgccgaaatgatcgaccggggtcgtcttattctcgaccataccaagtcgcaagacttctacggcgatttcatgttaagctacaacaaaacattcaaagatttcaccatcggggtcaatgccggcggtagcatgatgaactcttcctacgatcaatggatgattactcctattgccaaatcaggagcaccctataccgaggacctctcgtgcaaccaattcgttctctccgatatttatctcaacagtagcgaaaactacggaggacttactaccaaaaactgggaacgagccattttcgctacggcacaagttacttggcaagacaaagtaacggtcgagggtagttaccgagacgactggtatcgtgcctttacacagttcaaagatatggatccccactttgcctactattcggcaggtgcatccgctcaaatgaacaagatacttgttttgcccgaacaaatcaacgaattgaaactacgggcttcgtactctgaggtgggtaactctattcctaataacctattcctcgcatcggcaaaacgtaatccggcgacaggagcctacatcagcagtgcgatcattaacttcaaaaatcccaaacccgaaaccacacaatcgttcgaagctggtttcgacatcagtttgctcgatcgctccatctcgttgcaagccacctactacaacgccatcatgaaaaaccaattcatgaaatacgaaggtgctgccggcaaggaaatatatatcaacggtggtaaggtacgtaatcaaggtatcgagttaaccgcatcctatatcttcgctcccaacaacaatttcagttggattaccaacttcaattacgcctacaacgacaacaaaatcctcacggtggcccgtaagcaaaatggacaaaaatatacccacgaaatcgatatgggtaacctcagcggtctgaaaatcaaattcgaagaaggcggttcttatggcgacctctatgccgtcgactttatgagagacgaaataaccggagaaatcgttgtcgaccctcaaaccggagctccattcaaactcaatggacaagccaacgaatacctcggcaacatgaatgccaagcacaccctcggttggtccaacaccttcaattacaaagacttctccttctatttccttatcgatggaaaaattggcggtaaagtcatctccttcaccgaggcatacctcgactatttcggcacatcgcaacgtacggccgatgcacgggactacgccgttgccaacaacctctattggacctccgaggacggtgttgtcaccaagcccggcatgtatatcccgggaacaaaccaagtcgttccggtcgaccaatattatcagaccatcggcggtggatcacccgtaggacgcaactacgtatatgatgctacgaacttccgtcttcgtgagatttcattggcatatacgttccgcaatctcttcggacaaagcaagaacctcacggtatcggccaatgcccgtaacttgttcttcttgtacatcgatgcacccattgaccccgatacttcgttgagtacgcaaaatgctctgggtaacgtagatattttcagtatgcctactacccgttctttcggtatttcacttaaagcatcattctaacgaaacataacatcatgaaaacaacagtatatttatcagcattcgtttttgccgcggcaatctccttaatcggttgcggcgaccctctgctcgacgatctgaactccaacatcgaagtcggttcgggcgacctctctattgccgagaactatgaacaggcagccggtatgttcctgacggcacagcaaaaaatgcacgatgtcggagcatcgaacggtgcacacgtctatcaagtacaattcaacattcacatcgacaattattcgggatacatggccggaacacaaaattttagcgggaacctgccctctacctaccggtattttgcgcaatactgcgatggtcccaaagccagttttttcaacgtagcacaagcagccttacctgtaatgcgctcggctgccgacctcaatctgcgagaaatcggagccatgtgcaacatcatgtattgtttctctgcattggaactttccgatgtgtacggacctttcccgtggaccgattataaaaacgatgtgcaggaacctcccgtaacctacgaaccgatggatcaaatctacgactccctgttcgtcaatcttaaagatgcggggaaaatattgaaagagtttacctctacttccgaagaacatcaagataccattaatcagattctggctcaatacgacaaaatctgcggcgatgtaaaaacatgggaacaattctccaattccattcgtctgcgcatggccatgcgtatgtccaacgtcaatcccgatagagctaaaaccgaagcgcaatcggctatcgacgacggacttatcgaaaaaagcatcgagtacaacacgatggttaataacggaaccaatcacccgttggcatttatctccattctttggaacgacacacgtataaacgcttcgctcgaaaacatcatgaagcgactcaaagtacctttcatggataaaatttttgaaaaaaatagcgatgccatacgcgacgaaaacggagaaacgacgtggcaagcacaacaagacattgtgggagtccgcacgggaatccaactcacacctcgggacgataataaccaatacaccaaattttcaggtgtcacaagtgctttcgcaaatttcccgctcgccattttcaaactctccgagcgttactttctgcaagccgaggcagcccttcgatggaatatcggcggatcggtcaatacaaactatctgagaggtgttgctgccatgttcgacgattacgacatcgcacaaaccgaacccgacttccaaacctattggaatcaagaatcggcagatacttctatcgactacgtggatccgcacaactcacgcaacaacaccaaaggtctggttaccgtaggagtaaaaatcaacaacagcgacgacaataaagtaaagctcgaaaaaatcatcacccaaaaatggctcgctcagttccctatgggacttgaagcatggaacgacttgcgccgtaccggttatcctcgcatattccccgtcaacgatatcggagacggctcgttgggaaaaggtcgtatgattcgccgtattccgtggaacatgaccgatgcggcagccgcccaagatgtcaatacgtcggggatccaagccctcggaggaagtaacctgatgcgtactaccctttggtgggacgtagaagaccctgccggattgggcgacaatcgtcgttgggaaaccgaagtttctaactaaaaatttaatcggagagagcgtatagaaacgtacactctctcccctaaaataaaaaacaacttttttgagatcctattattaacttaaaaacaaaaaacatgaaaacaccgaaattagtattatcggtattggcttgttcggtagttgtgggaaactatgcacaaaacattcctacccacgctccctatgtagaactcttaccgaccaaagaaatttctatcgccggaggtgataaaaaaacagtctatctcgatttttatgactattttgaatcttgggaaccgggagtccccctttccgaagacgagaacttctacatcgcccgtgtccccatgaaaaaacgtttcgtgaacacggcaacacaggtagatcccaccatgacgcaagaccgcaaattcagtatgtggacgccgatgggtatatccgacacttactggcaatcgctaccgcgatatgtattcgacggcgataatttcagtatgtggtcctacgtggattcgcaaggcggctggtctctcccgtgggtacgtgtaccgggtgcatacagcgacgttactcaccgtaacggtgtagccaatagcggcggtctcatcttcttcgactcttggggaggcgataacaccagcccaacagctaatgtaaatatgctggtgaaaaaagaaggcggaaaattcaaatacgtagaaaaattcgtaaaattccttcgctattatggtctcgatggtgtcggtatcaaccccgaaggtccggttccccaagcctctgctttgcaagacttcttctcccaatgtcgggaatatgcagaatcgatcggttggcaattccacgtatattggtatggagtaggttctaacggaggatctatggatttaggttcctctttcggtagtagcaaacaagattggttgtggaaaaacaacaaacaagtagtcgacatgtatatgctcaactacgattggggatattctgcaagcagttcggctagctacgccgaacaaatcggagccaatccctacaccctttatgccggttacgacattcaaggaaactggttggcaagaggtccgtggtctacgttgaaaaacaccaaaatgtctatcgcattttggggaaaccacaccaccaatatgatttaccagaactcttccgaattcggttcgggtgacgaagctgtacaagcctgttacctcgaaaagcaagagcaagtattctccggcggtaaccgaaacccggcaaaacgcccggctattaaagacggaatttccagttccagcgaagcggctatgaacaactttcacggtatagcagaatacctgcccgcccgaagcgtactgcaagagttgcctttcgtaacccgtttcggactcggtaacggaaaaaccttccgtaacgaaggaaaagtaaccttcgggaacaaatggttcaacgtaggtgtacaggactacctgcccacatggcgctggtggattacagacgacagcaataacgtacccgaagacggtatcgaatgcggattcacttacgaagatgcttggtatgccggttcggccctacacatgagcggagctacgaaagtatccaacgttcgtctcttcaagaccaacttcgacgtttctgaaaccgacgacgtatcgatgactttcaaattaaatagcggcgaagatacgcacatgaaactcttctggtcgttcgtagggtcggaatctacattgcactcttgcgacattaccggagccaaagaaggacaatggacaaccttctccaagaaagcctctgaaatcggtatgaacggaaatgtagccctcatcggtctcaaattcgaaaataccccgacaaactacgatgtattcatcggcgaaatggctattgttccagcaaagacttttgcaccgatcaaaccagtcatcactaccgaagaaagcaaaatcttgaaaaaacgtacttataactcgatcgatttcaaatttagctgggattgcgaatcctccaaaaacgattccgatccctccatacccgtttataacgaagatgtagatacttggtacttcgaagtttacgtacaagcaaaagacggagagcccgttctttgcggaacgacttcttcttgggcacactacgtagtaggcgctccggtatcggccaacaatgaaatctcggattaccgaatcggtgtttgtgccgtagctcccgacggaaaaacgaagagcgaaacgacatggaccagttatctgactaccgacctcacactcgtcgacggtatcgaatgtaacaaagcggtaatcaaagccggcgaggaatttaccctctcgttgatcgaccccaaccaagaagaacctttctcttgggaaatctttaacgcaaccaccggcggtaatgccgtattcacccaagatggcggtcgttcgataaccacttcactgtcagaagaaggttattacgatgtaaaactcaccaaaggagatttgagtgtactctcttatcgcggctatgtacaaatttctcccgaaagcacaggtgcaattccttcgattaccgatttcacagcatccgacaccaacgtaaccctcgaagacggtactgccgaagtaacactcagctacaccggcaaaaagaacgaaggtacggtttctcgtggtttgcaggtagacgacccctatatgttccgtattccatcggatttcttgccgatgaatcaaaatcaatattcaatctgtctttggataaaacccgaaaaattcacgttcgctaaattcggtatgggattgatcgagcaacgcaatatggatatccactggcccgataataattggggagccctttgggtagacgtatggcctgagacattcaacaacggaggacaacgcattttggataacaatatcatttcttatactatgtggggaaatgaatcgcaatactatttcaacggaaacaacaacaaacacgaaattcccaacttggcttgttgtacagacggtaaccgtaccggaaccgaatcttatagtttatccgaaggtcaatgggcacacgtcctcatttcattcgacggcagcaaacaaagaatctatttcaatggtaagaaagtaggagaaggtaatgcttcaaaatacaattacaacgataataacggtggaactggaaacgttaaagctgcaaacatctacatcggtggttctcgcgtttactatgccggattttccggtgtcatcgacgatgtacaagtttggcacaaggcattgagcgataccgaagtaatagaagccatgaaaggttacgacggtaaagaaatcccctctgacctgaaaggttactggacgttcgaatcggacaactacaacgaaggcgaaaaagtgtttgaaaacaaaggtactttggttaccgacaacaaggctgcctatatcgaagtgaaaggtgcaggcggtgaaaacacctctgcaaacgaagaacacatattaccggccaatatcgctattcaaggtaacccggccatgtcgggtacattgcccatcactacgacatcgacattcgccgttgccgacgccgaagttcaaaacaccggtgacaacgcatcggttacattcaacaaagacggtaaatataacgtcaccttgacgcttgccaacggatggggctcggatacgaagacgaaagaagagtatatcgtagttctcccctcttcgggtatcgatggcaacttggtagataacctcacggtataccccaaccccttcatcgaaaatgtcaacctgcaattcgcagccgacggtaactacgttatcgacatcttcgacgcacaaggtcgtcaggtaactaccaaaaagcaccaagctatggccggcgaaatctgcacgctcacggtaaatgctgccaaaggcatgtactatgtagtcgtgtcgaaagacggcaaacgcgtgaaatctttcaaagtggtagccgaataatacaaggccattcaaaccctccgcacaagtccttgtgcggagggttattaaatcaatcagaatattatttagtatcatcttatgaaaaaaaattatctttttacattagcggctctcttgttagggagtaccatagcaaacgctcaaaagcctctcgacgggtatgaggagcctacgttcccgaaagatggaaatgtaggaaacatcgtttcgttcagtacatctggggcattggaagacctcgaaaacatctcaatacccaaaacgccaaacggaaaaatagcacaagaacttttggtcgctccgggggccaaagtagaatttacgataaaaataaacacttggtggggagcattcgctaccttctccgatgccaatgaaaccaaagaaatgacccgtttgatatattgcggaaactctggacaaggaggatttgaagacgcaacaaacggtgtaacagtatacgtggaagacaatacgtcgaaagtcaacacaggaactttacccagtattacaatcccggaaagcgccgaagagggaaccacttatctgctccgcatgatgtttttcggggctaacgacaccagcaatcccacctacaacggaacatattccgaagggacatactacgatgtaaaagtcacagtacaatctcaaatacaaaaatacgccataaacttttccacacccgaaaacggaactttgaccgtaaaaaatggtgtaaatcccattacatcgggtgatgaaatatccgaaggaaccattttgacggttacggctaccccttcgaccggctatgaattggtatcggtaaccaacaacgacgaagtatttccaagcgaaacctatacagtgaacgcatcggctaattttgcagccaccttcaaagctctacccaccgaaggcgatgccatgctgatgtcggctcccggttatggcaacggagaagattgccaactacgtttcaatgacacggtattaggagaacacaatacaactcaaaatcaagtatcgagcgaccaacggtctcgtaattataccttctcggcttggatttctcctatgggctacaacggagtcctcatgggacatgttcaaaacagtatcacttgggctgtcgaaggttcttatggcgtgggagtaaaagacagtaaactcgccgtttggtatcgcaaatgggacggtagcacgaccgcatgccccggagtaaatgccccggccgtatctgagaacacaacactctatccgggtgaatttgcatttatttcgctggtaaccagcaatgacggaagaacgttcaaagtatataaaaatgggaaagaggctatctcgcaagaagtagaagacggaggtttggcgttgctttacgacgcctgcgacttcgccatcggggactccaaatacaaccaaatgccttgtaaagtagaggaagtacaattatggaacaaaaccctcacccccgaggaaatagaagcctcgatgttcgggcccaaagccgatgccgaaggattggtagcccactacctacccgagtccgccgatgccacgacagttgaaaatctcgctggtgacatcgacgcttattatcgtaaaaatggaaccgttaccagtggtaacttcccaatggcagatgctttgcaaaaaaccaatgggcgctcccttacattagtaaaatacaatgcaccgtggggagaagaagacctcttcgaacttcaccgtttcaatgtcaatatcgatccccatttggcatcttccgcttatgtaaaacaatacagtaatctttatgtcgtagatcgtagtgaaatactcgatattgcttctgttactgtggacggaactccgcttgaaaacgtcagcgatcctattcctgtcgctgaaacaggagtaaatattcttgtcgaacaaaagaaagcaaccgccatcgaaagcgtaacggccgaggctattgcttactacaacgacaaggtgctctatatgtcgcaaggcgcaacggctgttatctataatttattgggaacggcagttgccgaagctaccgaaatgacaaccaatctcgaaaatcttcctgccggcatttatttggctaaggtttcgatgggcgaaaacacaacaatcattcgcttcaaaaaataattaggttttcatggccacaccccgtacccgcctgcctcgtgtgagtgcggggtgttttcaaaaaataccatggttcgcacggttcaccccgatttcgtcgggctttaatacacccctaccggtttatatcgcaactcggaaaaaccatgaaacacaaaatatagtctgtatcttttttatatcaaaaacaaaagctttttgcttaaacacatttagcgatgagaaacatattcaccctgcttgctttgttagtattcggtacgatactgagtaaaaaccatgctcaaacatactccatatatcccactccgcaaaaagtcatcgaaaccggagaggctatcaaattgacgcaacaaataaatgtcatttgcgaaagtggaatcggtgaagtgacccgcaaccgcatgaaagaagtactcgaagaagcaggatataccatcgcattctccacaaatccgtcgcagacgaatacgaacctctacataggaatcaacggctcggacggcgcagcagaccgctatgccgtagaaaacaatttgccccttgccgtttttgaaacgggagataataaattcgacccctatctcctgcaaataaacgacctgcaccctcacggcgacatcgtcattctgggtaatgataaaggttccgaattttatgcctttgccacactcgaacaaattttggagcaaaccgacggcaactcgatccgtcaaattactttcgaagattattcacacactcaatatcggggaatcgtagaaggattctacggacacccctactcggtggaaaaccgtatcagtctttttgaattttgtaaacgattcaaaatgaacgtattcgtgtatggaccgaaatcggatccctaccacctcggtaattggagggacgattatcctacctcgctcaccgaacagcaacggtttttcggtatgattacccaagatgatttgaaaacaatggtgcaagcagcaaaagcatgcaacgtcgatttcatctgggcagcacaccccggattacaacaagggatcagtttttcgaacgaatcggctatggctcccggtatcgacgccctcatgaaaaaattcgatcacctttatagcctcggtgtacggggatttggtgttttcatcgacgacatgacctacactcccagtggggacatgcaagctcatctagccaacgaagtacaagtaaaaatacgcgaacgatacactaccgacaacaccgacgaccaagtagcacctctttttttcgtccccacggcttacgctctcaactacggagcatcctacactctaaacaacctgaaaaaagtcgatagcgaagtagtcatcgcctttaccggatacgactgcttctccaatatccgcccctcggccatcgacgatatggccggacgcgtgggaagaaatcctgtcatgtggtggaacaatccggtaaacgacgatcatgacgaccgcatctacatgcgggagttaacaactcactggacaattgaaaaacccggtgcaatcaatacgctcaacgggcttattctgaacccgatgaaccaagcacaggcttcgaaaatcgccttgttcggagcggccgattacagttggaatcccaacgctttcgacgttcataaaaactgggaagaagtatttcaccgaatagccgatcccggcgatacgcagactgccgaagcgatcaaatgcttcgcccgcttctcgaacacgttggtcgaggacgaagaaatgataacgctctatgacaatttcatggagaaattcggcggcgaaagtttcccgccggaatccgacaagctgcgaaacgaactggaaaatcttaaacaggcttgcacgtacatcgaaaccctaaaagacagtccgcacagagattaccgattgatgtatgaggacattcgctgttggaacgccaagttgaaaaacataagtacgatagcgctcgacgcattggatatgctcgaatatggaaactccatgtcccgctccgaaggttgggaaaaatacctacgattgaaaaaactatacaccggtatgagttccgactctacctatctcgtaagcgctctcgaaggatatggaacttcgaccaccgaaaaattctatgaagtgaaaccgggagatagccatttgcgcccgttcacagactttttggtagaaaaaataggaaacagtatccccggattatggccggcaaaagacagtttgcaaataattaccaacatcgagaatttgcaaggtgtagaattgacggctcagaacgaaacggtccgattaaccggattgaacggactcgatctcgataaagacgaatacgtaggtatttatttcggaaacatcgaaaaaataaatgtggaagaaatcacggccgacaaaacgcttcgagtagagatttcggaaaatggaaaacagtggactccgatacaattacccatcagagaacaaaaaaccgcatatatccgaattaagaatatttcggaagaagaagtcgccgtagattttaaccaactatcggtttcccgtatcctcacctccgtagaagtcaaagccgaggcatccaccaatatgtcacaatatcaatcttactccataaacaacgtcgtcgatggaaattcctcgacattcttttggagcagcgaagcacaagccgcaggcgattatattcttctcacctacccttcggctcagcccatttacgagataagcatcacatttacagagaccgaccagctctcaggaaccgcagcgatagaagtctccgccgataacaaccaatggcaaacggtaaccgaatttacaaacggctatctcgactctacccgttcgtttacttgcaatgccaacggactcatggcacgatatgttcgctttatcattcgtaataccgtaggtagctattggttacaagtagccgaatttaaagcggatatgtctgaaaaatacacccaaacgaccgaccaaagcggagtgcaaatagccaccctcgccgacaaagacctttcgaccaactaccaagctggcgaagcaggatatatcgaacaccgttttatcgaaaatataacgatagagtcgattgaaattttccacaataccatcttcgattccactcgcaaactcccgtcaatatatgtcaacaatggctccgaatggatcgaaaaagggtctttggaaccgttgtgcacagtcatagacacccatgaaatagatacggtaacagccgtgaaaatagagtggaacaaagagaatattcccaatctttacgaaatacttcccgttgggactccttatgtagaaaaaccggggaaacccaccgccataaataacataaaaaaagacggtctaaccatatatacaaacaataatcggctgatcgtacaatcggacgatatgatacaaaatataattttattcgacttaaacggaaaaacaataaaccattttaacgtgaataaatgtatctttgaaacaacattcggctcgaatattccacaaatattaatcgtgcaagttatgcatacaaacggggatttatcgacctgtaaaataatacgataaaagcaaaaagatagaacaaaaagatcatcacatataaacaaaggacatgaaacgaacaacgctatggataggtttgggattactgcttttttcaagctgttctaacctcacagaaacgcagttacaatacatcgactatgtaaacccgttcgtgggtacgggaggtcacggacacacattccccggccccgtcgccccccacggaatgatacagcccagtcccgatacccgtatatacgggtgggatgcctgctcgggatatcactattccgacagcacgataaacggattctctcatacccatctgagcggtacgggctgtggagactacggagacgttctgttaatgcccaccgtaggaaaacaaaactatcgttacttgggagacggttgccaacaaaccgcctatgcctcaccgttctcgcactacaaagaagtggcaaaaccgggatactattcggtagaactcgatcgttacaacgtgacagccgaactaacggcgacacctcgggcggccctgcaccgttatcgtttccccgaaagtaaagaggcaggatttatcgtcgatttggattacagtctacaaggacaagaaaacatcgatatgaagctcgcctcgctcagcgataccgaaatagtcgggtggaaaaagaccaaaggctgggcggaaaatcaatgtataggcttttacatgaaattttccaaaccattcacttgccatatcgtcgacacggtcatcgatatcgtgcgcgatggaaaatcctgtaaattggaacagaaaaaagcactgctccaattcccgacggcacaaaacgaagaagtgcttgtaaaagtaggtatatcggccgtagatataaaaggagcacagcggaatgtcgaaaccgaaattccatcttgggacttcgacagtataatgaccgctacacaaaataagtggaacgactacttggaaaccattcaagtcgaaggtaataacgaaacccaaaaacagatattctacacagcactataccacacggctatacaccccagccttttttccgatgcggacgggcgctatcgtgggctcgaccaaatgatacatcaaaccaaacccggcaaagaaatatacacggtttattcactatgggatacttttcgtgcattgcatccactattgaccatcatcaaacccgatttaaatgaaaaattggtgatgtctcttatgcaaaaataccacgaagggggtattctgcccatgtgggaattagcaggaaattacacagctacgatgattggttatcatgctatacccgtaattgtcgacgcatatatgaagggattcgacaaaatcgatggaaaagaattgctcgaagcctgtatccgcagctcagtatatgatacgaccggtattatcgcatcgagcagaatggtcaacgggttggttcccatttctaaatactacaaaaataaaataggttatattccctacgaaaaagaaaacgagtcggtagccaaaggtttggaatacgcctataacgattggtgcatcgctcgattggcagaagaaattggcgatacggccacttacgaaaaatacaaggcactctctaaatcatacatcaattactacgacccgcaaaccagattcatgcgtggtaaagacttgaaagggaattggcacgttccatttaatccccgttactccgaccaccgcaatgacgattattgcgaaggaacagcttggcaatgggcttggttcgttcctcacgatatagaaggacttatcgccttgatgggaggtcaggaaaaattcattggtcgactcgattctctctttatcgccgaatctaagatagaaggacctctcgtatcttcggatatatcgggactcatcggacaatacgctcatggaaacgagccaagccatcacatcgttcacctttacaactacgtgaatcaatcgtggaaaactcaacagttgatcgatacgattctccatacccaatacttcaacaaccccaatggattgtcgggcaacgaagattgcggtcaaatgtcggcttggtatgtgctcaatgcgatgggattctatcaagtatgtcccggatcgcccatatattctgtcggtcgtcctatcttcgataaggtaaccataaatctacccaatgggaaagtattcgaaattatcgccaacaacaattccctaaccaataaatatatacagagcattcgcctcgataatatcttgctcgaatctcctttcttcatgcatagcgacattatgaaaggcggaaaaattgtaatggaaatggggaacaccccggtcaaacaataaacgaaatcagatattaacatcacataatccaaacagttatgaaaaatatgaatcgttatctcgcacttgtggccttgataatctccttaatctcctgccaaagtgaagacaacccaaaccgttatgaattaataccctatcccaatgacatggaacagatgtcgggacgcttttctttcgatgacgacacacagatttttatttcaccggaatgtggagacgaagtaaatgaaatcttggctcggtttgcagaacaattcggtaaaacagccggcaaggacctaaaaatagccgaaaaaggaggcaaaaatatgatgatcgtaaaaatcgacacgactatgagccaagaggcttatcggctaaacatcagcaaaaagaaaatcgaaataaccgcagctacgcccaacggcgtacgctatgcactacaaaccgttaaacaactccttccggtagcgatctatggagaaagcctctccgcagatgaaaattggtcggttccttgcgccacgataaacgatgctccccgttttggatatcggggaatgcacctcgacgttgcccgtcatttcttcacattagacgaagtaaaacggattctcaacgtaatggctgttcacaaactaaatacattgcattggcatctcaccgacgatcaaggctggcgcgtagaaataaaaaaatatccacgattgaccgaagtgggcagtattcgcaacaaaaccatgattcgtaaagaatgggataactacgacactaccccttatggtggattctatacacaggacgaattacgtgatatggtaaaatacgccgccgatttgggtattactattattcccgaaatagaccttcccggacacatgatggcggcattggcctcttatcccgaattaggttgtacgggtggcccgtacgaagtttccggacagtggggtatccgtgacgatgtgctctgcgtaggaaaagaaaaaacattcgaattcattgaaaacgttttgctcgaaatcatagatatatttccctcgaaatacatacatattggaggtgacgaatgtcccaaaattcgatgggaaaaatgtcctgcttgccaagcccgtatccaaaaattaggactcaaagacgacgaacatggtaaagccgaacactatctgcaaagctatacgaccgaacggatagagaaattcctcaatgaacacggacgcgaaattatcggatgggacgaaatgctcgaaggcggactcaccaccaatgcgactgttatgtcatggcgaggtgttgcgggaggtgtcgaagcggcgaaacaagggcattatgccatcatgacaccgactgcccctctttatctcgactattaccaatcacgagatacacaaaacgaacctttggctatcggcggttataatccagtcgatatggtctacaatttcaatcccatacccgaaagtcttacagaagaacaagccaaattcatattaggtacacaagctaacatctggacagaatatatcactactcccgaacacctcgaatacatgatacttcccagattagcagcactgagcgaagtacaatgggatcaagtcgaaaacaaaagttatgaccggttcctcgataatataggccatatccttgccatctacgatgtaatgggactcaactatgccaaacatatactcgaagttaaaggcgaatactcggtaaatgaaaccaaaggctgtatagaagcgacactccgtacacaaggcaatgcacccatctactataccctcgatggatccgaaccaacgacaaacagcacccgatataccgagccgatagaaatccgtaccgaaaatgattcttgcacattgaaagctatcgtcgtacgcgaaggcatcgaaacccgcacactcgtgcgccccttcaaattcaataaagccacaggacacatgccccaactgaaagatgcacccagtgaaaaatatactttcggaggagccggtgtactcaccgatggcatacatggagatttcaattacagcaacggttgttggctcggattcatcgatacgccgttagatgcaacaatcgatttaggaaaaacgcaaacgataagtcaggtcaaaatagggtcgctcgtacaatattccgagtacattttcccgcccacccaaataaaagtctatgcgactaatggagacaacccgatgaccgaaatcgggaaactcgaaattccggtaacacaaaaacaagaccaagacggagtacggaaatatacctgcgaatttcctgccgtccccgcctcgaaaatccgggtggttatcgataccactgataaaataccggcatggcacggagccaaaggtgaaaaaggttggctttttgtcgatgaaatttctgttaactaatgattattaccgaaacgtatgaatacacataatatattcaaatccgttctcttctctacactgttacttatcggaaacagctgttctgagcgaaaagaaatagatgttatacctatgcctcgatcggtagagtatcacagcggaaattttacaatttcacccgagaccaagttctatacaaacctctccgcagaaagtcgtcaagctctgaccgactatctcgaagggacatcgctcagttccgttccctttgccgaatcagctaccggaaataacggaatagaattgaacctctgcgatagttccatcgtgacaggaaatgaagcctatcggatcgaaatcgttaaaaaaggtgttcgcctgtcggcaaataccgagactgggatattctacggactccaaacacttctgcaactgttgaataacggcgataacaaaactcttcccgctctgacgatcaacgattcccctcgtttcccataccggggattgcacctcgatgtttcgcgccacttctttgataaagagtttgtcaaaaaacaattgaatgcgatggcctatttcaaaatgaatcggttgcattggcatttgaccgatggtgctggttggagaatcgaaataaagaaatatccccgcctcacctctttcgcagcgtggaggccattcgataaattaaacgactggtgggtagaaggtcgcactttctgtgagcaagacgatcctcgtgccgtcggcggatattacacacaagacgacattcgggaagttgtcgcttacgctgccgaacgtcatatcaccatcattcccgaaatcgaaatgccgggacactccgaagaagtattggctacttacccagagttatcttgttccggtaaaccctatgtcaatgccgacttttgcataggaaccgaaaaaactttcgaattcctcgaaaacgtcttactcgaagtaatcgaccttttcccctctgaatacattcacatcggaggtgacgaagcaagcaaaagtagttggaagacatgcccccgttgtcagaagcgcatggccgacgagcacttaaattcggtagacgaattgcaaagttacatgatacaccgcattgaaaagttcttaaacgatcacggtcgtaaaatcatcgggtgggacgaaatcatagaaggcgggctatctcctacggccacagtcatgtcatggagaggagaagaaggtggcatcaaagctgtaaaagccggaaaccaagccatcatgacacccggtaaatactgctacctcgatgcatttcaagatgcccccaacactcaaccgatggccattggcgggtatcttactttggaaaaagtctactctttcgaaccggtccccgattcgctttccacgaaagaagccgagctgattctaggtgtacaaggaaatgtatggaccgagcacatacccacacctgagcactacgaatacatgatatatcctcggatattggcacttgccgaaatcgggtggtcaccttccgaggtcaaaaagtgggataatttccacacccgagcccttcaagcggtaaatatacttcgagaacagggttataatcctttcccactcgaaaaagaaataggcgataaacccgaatcataccaaaaggtaaaccatctggctatcgggaaaaaagtaacctatgccaatccttatagcaatcattacgcagctcagggagagaaaacattggtcgatggtgtccggggtggttggatgtacaacgacgaccgttggcaaggctttatcgattgcgattttgatgtaacgattgatctcggtaaagaaaccgacatcaaacaagtccgtgccgaattcatacagcttaaaggtccctatgtatggttacccaaacaagttatcatatcgagctccgtcgatggagaacattacgataccctcgcgactgtcgacaatgacatttcacccgacatcgaaacgcttcaattcaaagaattcggttgggaaggtaatgcaaaagcccgctatatccgctacaaggcattatcgaacggcattgccggagggtggctattcaccgatgaaatcagaatcaaataatcgatatcccatttatagaacagaaaaagacacaattcgggaaaatgaagaaggttagtaaagaaaaatcgataaatcctattgcatgggtcccctcggcatattttgccatggggcttccttttatagcggtaaatctcgtttccacattcatgttcaaggacttaggaatatccgatacccaaattgccttttggacatctgtcatcatgctaccgtggacattaaagttcctttggagtccttttttagaaatgtatcgtacgaaaaaatttttcgttatcgtcacccagttactgagtggattattattcggtatagtagctctctcattgaacttcgactattttttcgctatcagtatctccacgatggccgtcatcgctttgagtggagccacgcacgacatagcttgtgacggcgtctatatggccgaactatcgcccgaagatcaggcaaaatacatcggtgtacaaggagctttctacaacatcgcgaaattagtagccaacggtggattggtagcagcagcgggaatgctagctgaacatttcggcgcatccgaaggagcctctattcaagcgaatatgcccgcctataaagaagcgtggatgattatttttatcatcatttcggcactgttgttgctattggggctataccactcaaaagtacttccttccacacaagtaccaaaccaagaaaaacgttcaagttccgatgtggcgaaagagctatgggaggtcattaaaaacttctttaccaagaaacacatcttttactatatctgtttcatcatactctaccgctttgccgaaggatttatcatgaaaatcgctccgctatttctgcgttcttcacgcgatatcggcggattgggactttctcttaccgaaatcggcacattgaatggagtgttcggttcagctgcgtttgttttaggatcattgttagcaggagtttacgtttcgcgtcgaggattgaagaaaacgcttttcaccctctgttgcgtattcaactttccattcgtagcctacacattattagccatattccagcccgaaaatctctatctgataggaaccggtatcgttatcgaatattttggttatggattcggattcgtgggtctcacactcttcatgatgcaacagatagcgccgggcaaacaccaaatgtcacactacgctttcgcttcgggtattatgaacctcggtgtcatgcttccaggtatgatgagtggatttttcagtgattggctaggctatgaaagattctttatctatgtattgttggctacaataccatcgttactaatcacctacttcattccattcacctacgatgattcgaagaaagaaagtaatcgatgacaaaaaatagatctacgttcaatcgcgattaaacattaaacacatatacattaaaaaagaaaaaacgatatgacaaaaaaaatggttatgccctgggaagaccgtccggcaggatgtgcggacgtcatgtggcgttattcgaaaaatccagtaatcgaccgctaccatatcccctcttccaacagcatcttcaacagtgccgtagtaccttttgaagacgggttcgccggagtgttccgttgcgataacaaagccgtgcaaatgaatatctttgcaggattcagcaaagacggtattcattgggacatcgaacatgatcccattaaattcaaagcaggaaataccgatatgatagaatctgaatacaagtatgatccccgtgtcacttggatcgaagaccgttactggatcacatggtgtaacggctactacggtccgaccatcggtgtaggctacacattcgatttcaaagagtttttccaatgtgaaaacgcccttctgccttttaatcgcaatggagtactgtttccgcaaaagatcaacgggaaatacgccttgttgagccgcccgagtgacagcggacacactccgttcggcgatatttatatcagttacagccccgacatgaagttttggggcgaacatcggcacgtactctctcccacacctttccccgtgagcgcttggcaatgtaccaaagtaggtgctggccctatccctatcctcaccgacgaaggctggctcatgttctaccacggtgtcattaccacttgtaacggattccgttactctatgggagcggcaattctcgaccgtgaagacccctccaaagtgctttatcgtacacaaccctatctccttgccccggcaatgccctatgagatgcaaggcgacgtacccaacgttatattcccttgtgcagcccttcacaacgaagatcgagtagcggtctattacggcgcggccgacacagtcgtgggaatggcattcggatatatttcggaaatcatcgaatttaccaaaaagaactcaacaatctgatttttttatgaacattcgcaatctcatcgttgcgggaatcataatgacagtctcgtccgccacactatcggcagacgagcctgtcgcttatgtaaaccctttcatcggaacaacgaacttcggaacgacgaatccgggtgcaatctgtcctaacggccttatgtcggtcacaccattcaatgtaatgggttccgacaaaaacgtatatgacaaagatgcgcgctggtggtccaccccctacgaataccacaacacattttttaccggattttctcatgtaaaccttagcggcgtgggctgccccgaattaggctccctcctattaatgccgacaagcggagaactcaatgtcgattacaagcaatacggtagtgaatacgctttggaagaagctcacccgggctactatgccaaccggctcactcgctacggtatcgatacagaagtgagtgctacaccccgcacctccatcgcccgattcacctacccgggcggtgaaagccacatattgctcaatttaggagaaggactcaccaacgagagtggagcgaccatccgtaaagtaagcgataccgaatacgaaggtagcaagctcctcggtggattttgttactacaaccggcagggagtattccctatctacttcgtgatacgggtcaacaaaaagcccctacaatcgggatactggaaaaaacaaagacctatgaccggtgtagaggccgaatgggatcccgataacgggaagtacaaaatctacacccggtacaccaaagaaatgtcgggcgatgacataggagtattcttctcctacgataccaaacccggagaacagattcaagtacaaatgggcgtatcgttcgtcagcatcgagaatgcccgccaaaacctcgacagtgagcagcaaggattccaattcgacaaagtgtgcctcgatgcccggaatcaatggaacgatatactctcccgaatagaagtagaaggaggttccgatgaacaaaaaaccatcttctatacggcactataccacatgtttattcaccccaacattctccaagatgtcaatgggcaatatcccgctatggagagcgacaagatactcaccacccggcacgatcgctacaccgtcttctcgctatgggatacattccgcaacgtacacccattctttaccctcgcttatccccaaaagcaactcgacatggtacagaccctcatcgacatgtacaaagaatggggttggttacctcgctgggaactttatggaaacgaaacgctcaccatgtcgggagatccggctatcattatgttggcggacacatggttgcgaggacttaaaaacttcgatgcagaaacagcctatgaggcgatggtaaaatcggcgactgctcccagtagcgaaaatattttacgcaccgataacgacgactacatgaaactgggatatgtacccttacgtgaacaattcgataactccgtatcccacgccctcgaatactatctggcagatttcgcactctcccgcttcgccgaaaatttagggcacaaagaagatgcccaaaccttcgccaaacgttcgttgggctacaaacactactattgcaaagaattcgggacactgcgtcccatactgccagacggctcgttctacacgccgttcgatcccctgcaaggactcaacttcgaaccggctcccggattccatgaaggcaacgcatggaattacaccttctatgtcccccacgacatcgacgggctaaaacgattgatgggaggagaaaagaaattcgccgccaagttgcgaaatgtattcgatgaaaacttctacgatccggcaaatgagccagacatcacttacccctacctttttgcccaagtcaaaggtgaagaatggagaactgactcgctagtcaactcgctcttgaaaaaatacttcaagaatcaacccgatggcatacccggcaatgacgacacaggaacgatgtccgcatgggccgtattcagtatgatgggtctttatcccgattgtccgggaataccccgttataccctcgtagctcctatcttcgacaagattatactccatctcgatcctcgttattatacccaagacaccctggtcatcgagtgcgaacggccatctccgaaggctatctacaccgaccgtatcacggtaaacgggaaaaaacataaaggacgattcatttcccacgaagatttagtcaatgccggtacaatccggttcactcttaccgagaaaaaataaatccgatctttctccataacgcagaagcggagccaatttccatttgaggaaattgactccgctcgttttataaattccgaaatctattgactattcccactcgatagtcgaaggcggtttagaactgatgtcgtaaaccacccgattcacgccacgcaccttgttaataatgtcgttagatactttggcaaggaactcataaggcaaatgagcccaatcggcagtcatgccgtcggtcgaaagaacggctcggagggcgacagcccgctcgtatgtccgttcgtcgcccatcacccctaccgactgtaccggcaacaaaacgactcccgcctgccacactttattatacaggtcgttgtcgataagtccctgtatgaaaatatgatctgcctcctgcaagatatgtaccttctcgggtgtgatatctccaagtatacggacagccaatccgggaccggggaaagggtgacgtccgatgagtttctcgctgatacccagttcccgaccgacccggcgcacctcgtctttaaacagcagacgcaacggctccaccagtttcaaattcattttctcgggcaatccacctacattatggtgcgatttgatagtcatacccgtaatcgaaagcgattcgatcacgtcgggataaatagtcccttgcgccagccattttatatcggtcagcttacgagcctcacgatcgaaaatatcgataaaacctttgccgataattttccgtttcttttccggctcggtcacccccttcaactgttcgtaaaaataatccttagcatctatgcccaagacattgagccccatatccttgtagttggcaaggacgctctcaaactcgtttttccgcaacaaaccgttatcgacgaagatacaggtaaggtgattaccgatcgccttgttaagcaacacggcagccacagtagaatcgacacctcccgacaaagccaataccactttatcgtctcccaacttcgtacttaattccgctactgtatgttcgataaacgatgccggtgtccagtccatatcacagtggcagatatcacgtacgaaattcgtcagcagaagcgtgccgtcttcgctatgatatacctctgggtggaactgtacaccccatgtcagttctccctcgatatgaaaagccgctgtctttacttcatgggtactggccacaagggtgaaggtagagggaattaccgtaatagaatcgccatgcgacatccatacggtggaattctcccgcacaccgcgcatgaggggatcgttctcatcatgccaagccaaattggcacgaccatattcccgggtatcggcagactcgacctttccccccgacgtatgagccaaaaattgcgccccgtaacaaacgccaagtaccggataaacaccacggatacgactcaaatcgacaaaaagggcattaggatcgttcaccgaatagggactccccgagagaatcactcctttaattccctcttctccgtaagggaatttattgtacggcaagatttcgcaatacgtgttcagctcccgcaaccgacgggcaatcaactgcgtgtattgagaaccgaaatcgagaataataattttttcctgcataatcgtaggtctttatgtatgttgtatatgattttctattttatcctgaatcaactgtttgatattatccggctccccgacaagccaaatcacatcgtgcgcctcaaaacaagtttgtccgtcgggctgatgaaatgttccgtctgcacgttctattcccacaacgaggcaattattcttattacgaatgctcaacgacgagctcgtttgcccgatcaacggcgaattcccgggaacaacaacatgcgtaaatgtgacttccctgttatcggtttcctcttcgggcgattcactaccttccactacggtaagcaaagattgaatctgatcatctgttccaataacaccgatcgtatctcccggaaaaattcgggtttcccccttcgggatattgattcgccgagttcccctctgaatacttacgacattgattccatattctttgcgtaaatcggaatccattaagcgacgtccggcaaacggacagtctgcatttacatccatataggccaaatgcatatcgctcaccaagctcgtattccgtcctgtctttcgcaattccctttcgttcaagttatccataaatatattttcgatacgcatgaactgcttctgtatgcgcttagacaataaaatgagaacaacaatgaatatacccagtcccaacaacacgccggtacgttgagagtggacgatagaaagataatatataacgaaaaacaaagctagcaatatgcggaaaactatcatcaaagtcaatggaacccggtttacactcccctctcccaatttccttatcaaggacatgcttacctccttaaccatcaaagcccacaagaacggcgacatcactaccaaagttacgatagcggcgatcatacgcccccactcaggcaaaatttccaccatcaacggtataaaccacattttagagaccataattatcgctacgatcagcgacgaataaagcagtactctccacaaatattgtgcaatagcctctttccatactgccttatgaggctttatttcggttcggctctgactataacggtcgatagctgcaagccacctctccggcaaacgtcgctcaatccaactataagcagggtcggccaaccgaatacaataaggagtcaaaaaagtagttatcaccgatactgccacaactatcggatacagaaatttgtcgatcacattcaacgacattcccaacgaggctataataaaagcgaactcaccgatttgagataaactaaaccccgattgtatcgatattttcaaagtctgtcccgaagccaacatacccaccgtaccgaagaatatctgtcctacaataacaacaatagagagcaaacagataggcaatgcatattgactgagagacgccgggctgaccaacatacctaccgatacgaaaaatatggctccaaacaggtcctttaccggttgaacgactttctctatccgttcggcttcgttcgtaccggctaatatagatcccatgacaaaagcgcccaaagccgaagaaaatccggcataagtagccaaaacgaccatacccagacagagccccatagaaacgaccaacaaagtctcgtcatttaaaaacttacgtgtttttttcagaatcagaggtaatatggagattcccacaacaaaccaaataatcaggaaaaagaccaatttagcgatactctccaacagttccgccccttcgaacgagttcttcacggcaatagaagaaagtatcaccatcatcaccacggcaaacaaatcttccacgatcaacacaccaaaaactaaattcgtaaaagccttcttgcgtaaattcaaatcggtaaaggccttgatgataatcgtcgtcgacgacatagataacatcgctcccaaaaagatactgtcgagatacgtgaaatgtaataaccgaccggctccgtaacctgccagcatcatacccaatacaatgactagcgctgtaagaacggccgatgcccctacttgaaaaagttttttaaagctgaattccaatcccaaagaaaacagaagtacaatgatacctagttctgcccataaatttatatcaccctcatctactatggtagggaaaaaaacgaaattgggacccactaaaaaaccggcgacaatataacccaatacaacgggctgtttcaatttcttgaaaagcaatgtcactaccccagccacaatcaaaataagagccaaatcggtaatgagggcatccaattccataatcaaatctcgttttgaagtgaaatatattccgttcggtaaatattacgcatatgggaaaaaagagaaacaaaatcggtcgtagaccgagacaaaacgataaatttcaaatcggtcttctgttccgaataattatattctaccaacacattgtgtaacgaaaccttatactcacccaataatttttcataccgggtcaaatcctcgacaatctcggtcgctttcaaatgtataatttttccttcccggtctaaattcgtccgacgttcatattgttccaaactcaccaacgtgaacaatatcaatatggtcgaaataatcgcaataacataaagacctacacctaccgccaaacccaaagccgccaccatccaaataccggcagctgtggtcagacctcgtatcgaaccttttgtttgaatgatggctcccgcacccaagaaaccgacacctgtaatcacttgtgcggcaactcgtcccgggtctccgtttttcaatcccaaataaacctgtggaatatagatagagataatcatcgccaacgttgcacccatagagatgagcgcaaatgtacgagcaccggctacttggcctttccgctttcgctcaaagcccacgataccccccaacaacaaactcagcatcaacttgaatatagccgaggtcgtcgtaacctctgtatccgaaatagtattcagaaaatcattgaagaggttcatatcacaattcttttgattatgcaaagatagtgcaaggtgagcgcagaagcaaatttatttgattatgccgaaccacagcccgtcttcgcaactttgcaaagatagtacaaggtgagagaaagacaaagcaaacatgtttacttttctcgccaaactccctcacagcttaatgaacaaaacaaatttatcagaaagcgattttcccgataaaccggaaacaaaaaaagagcgataacgaaagttaccgctcttttactaatattgtagtacgacttactggattcccgaagtcgctacttccgacgaaattttctttaccaaaccttgcagcacagctcccggtcctacctcgacaaacgtatcggctccggcggcgatcatgttttggatagtttgtgtccaacgtaccggagcggtcaattgagcgataaggttcttcttgatcgtttcaggatcggtttgaggttctgcattcacattctgataaacaggacatttcggagcatggaaatcggtatgagcgatggcatctgccaattcagcacgagccggctccatcagaggagaatggaaagcaccacccactttgagtttcaaagcccgttttgcaccggcctccaacatctttgcacaggcagcatctacaccttcgatagaacccgatataacaatttgtcccgggcaattataattggcaggaaccacgacaccttcggttaccgaagcgcacaattcctcgactctcgcatcgggtaaagccaacacagccgccattgtcgacggtgttttttcacaagctttctgcatagcctgcgcacgtgccgagacaagacgcaaaccgtcctcgaaagaaagtgctccggcggctaccaatgccgaaaattcacccaacgagtgaccggctaccatatcgggattaaaatcgtcacccatcgtttttgccaaaattaccgagtgcaagaatatagcaggctgggtaactttggtttgacgcaaatcttcgtctgttccgttaaacatcaggtcggtgatattgaagcccaatatctcgttggccttatcgaacatctctttggctacggggttattttcgtagaggtcttttcccatacctacaaattgcgccccttgtccgggaaatacaaatgctttcattttcttcttttttaattacggaaaattttccttattcaaaaatcgctgcaaagttaatcaattttgatatagatttgttgtattatacaaatattctttcttattttgttcccattgaacgaaataatacttaaacgataaaataaatgaacacattttctgcgatacttttactcttcgggaacctcggtacgacagagcttattgttatattggtagtggttttacttctttttggaggtagaaaaataccggaattgatgcacggtatcgggaagggtgtacgtagtttcaaaaagggaatgaacgaaatcgaagaggaaataaatgctccggtctccaaaaacgaggaacagaaaaaggaagaagggaaataattactcgatcgttcactataattataatcattatcatttctgcattctcatgtataaatgatattttacggttttaccacacttgtagagccacgacacattcatggataacgagctgaaagagatgagtttttgggatcatgtcgatgacctgcgcagagtcatactacgctcggtcggtgcaattatcctcttatcggtcgtgttttttactctcatgcctcgaatattcgacagcattatccttgcgccctgtcattctgatttcatattatatcggctactttgtgacctgagccaacacacgtccatcttaccggatttttgcaacgaccatttcgaggtaaaacttatcaatatacaattagcttcccagttttttatccacatgagcacgtccatgtggattgccttgttgtttgcgtttccatatgtcatctatcaactgtggactttcgtcagtccgggattatacgccggcgaaaaacgacatgccagaggggcatttctcgcaggaaatatcatgttctttatcggtatcggagtgggatattttcttgtatttccgttaacgttgcgttttttggcagagtaccaagtgagcgaaatggttcctaaccaaatctcactggactcatacatgagcaacttcctcacacttaattttattatgggactcgtattcgaattacccctgctgtgctggttgttgtcgaacatggggcttatcacaagacgttttttcaaaacttatcgccgacatgctatcgtcatactacttatattagctgcgtttatcacaccatcgagcgacccatttactttgtctgtcgtattcgttcccttatatgcattatatgaattgagcgcatgggtggttaaaccggcttctcaaaaagacgacggaaatagcgaagaagatagtaacgagattttagacgaacattaaatcccctcttattccgacgaaatcggaaataagagagctaaaaataaggacagaattccaaaaagaaagggtctcatatagattatatgggaccctttttgtgactccgacaggattcaaacctgtaaccttctgatccgtagtcagatgctctattcagttaagctacggagccatttccaaatctgttttttcatatagttgttctcgcttgaacaaccttgcattgagtgactccgacaggattcaaacctgtaaccttctgatccgtagtcagatgctctattcagttaagctacggagccgtttgcggttgcaaagataggaataattttattccgacgtatctttttatcttatttttttacctctaatatatgatttttttctatcgtacccattttcagataaatagattttttcttattccaagaatttaggactgaataccaacagaccgatatttataccgaagttccagttacgtgctggataatcatagtaattggcataaagactaatcgaagcgaaagagagatcgagcactaaggaactctcgcccataaaatgatacttcgtaaaggcttttccataatagggaaccatattttcaccttcgtaaatctgccgaaatggagcaaaaacatagaactcattgcgaaattgcaaattattcaggattttccaaatgggtatcactcccgcagccaaatattgtgtggaacgaaaagctggattgaagatagttttactatgcggagtaggagtaaatgccggtgcttggattagtgtggaagtataattactcaacagtcctttactcgataccacggcttttccccgaacacccaacacgaatttatttcccaaagggaaataggtatgaatatttccttctatctgtaaccacgaaagtgtctgtttgctatgtggttgcaaattcgagttatatggtttgaatcgttcttttccatacgccaatagccctaatacggaacaatctgtaccagaggtggggtacatgtaattattcaaattattttgatcgaatttcatcgatgctacaagcaagttataacgactgcgatcctgttcattcttggaaaaatctaccgtattggattggtaatacttatcgttcatcgaaccatatccaacagaaacgacagcttttgaaccggtcaaaaacggcaaccccaaccgtaacttcacatattgctcggattgtgtgataaaagagggcatacggtcggaataaaacaacgtttcattttgataaaacttttgtttagaagccacagcttgcagtttcagatacataggtataacggtcttcaaatcgaaacgagccgataacatgccagaagtataagactgtcctatttgcccacctaaatcgagatcgagagaattgaggcttaccgtgcgatagtgtgcacctatatatatttgattggaactagtcgacgaaataaatcctcccattcctatcgccagttgatcgtgcacttttgctttaatatcgagattgaacatgccactttccttgtcgtatcgggcatgaggtatcaaatcggatatttttccatcggatatggttttatagtaagcagccttagcctgctcatcggaaaaaggttcatctgaatcgaattgccgacgaatatactcccgttgttgatgattccctccctctaccgaaactttatcaaatacaaggtcgggggttttacttttgaaaaccattcgctgcaattggcgggtgtcctgagatagttctctgggaatacgacttttgatagaatccatcatagctatcgtacggtcatatcctatcttggcaatttgccgtgctttgggaaagtcgagaagtcctacatcactcaaattgaaacgcatcaaaatcccatcttcgggatcgagagtataatcgcttttttgcatgaccatattctcgatttgattcatcaaatcatcttctttgggtttatccagtttagcggcaacaatactcccgatgatgatatcgggattaaaatcggacttcatcacatcgacagggaaattattataaataccgccgtcatagaccaatacgctgtcgatttcaatcggtttgaatacgaaagggaaactcatggaagctctcacggcatcacccaaatcaccattcctcaatatgacttctcgcttgtgatatacatcggaggcaaccgctcgaaacggaacgaataaattatcgaaattcccttcgcactgtgccgaataaggtgcaaatatactcatgaacgcataattcatagggaacggattgatgaggctattaggcaagaaatgcggttcgaatttagtcgagtcttgtaaagcgacattaaatgtaacgatctcgggagtaggatcgggtttcttaaaataatagacgtatcttttgtcaaaaattccacgagaccacaagttgaaatcttcggaaagaatcaaatccagcatttcgtcgggggtatatcccatagcataccatgcccccacaatagcccccatcgacgtaccggctacataatcgatgggcacattattttcttcgagggctttgataatacctatatgcgctattcccttagctccgcctccgctcaaaaccaagcccacggtctgggcctgtaaacaagccaatccacaaaccactgtaaagagaatcgacaaaattcgtttcataattcatattatcatttgcaacaacccggcaaaatatactcatcaattggcttcggaaataaacgaatctttaaatccgataaaatagagaacaccatcgaggcctatcgtcgatatagactggctagcgttttccttcactttcggtttagcatgataagcgatacctaaacctgccgtactcaacataggcaagtcattcgctccatctccgacagctatcgtctgagctatatccacgttttctacctgtgctatcaatttcaacaactcagcctttcgacgcccatcgacaatatcgccgacataacgtcccgtcaatttcccatcgattatctccaactcattggcatacacataatcgattccataacgttgtttcaaatagtttccgaagtaggtaaatccacccgaaagaatagcaattttgaatccggcccgtttcaacacttgcatcagacgatccacgccctcggtgacgggaagcgattcagctacttctttcaagaccgattcgtcgagtcctttcaacagaccgacacgtcgtgcgaaactctcgcaaaaatcgatctcccctcgcatagccgactcggtaatcgctttcacttcgtcacctaccccggctctcactgccaactcgtcgataacctcggtttctattagtgtagaatccatatcgaaacagatcaaccgacggcaacggcgatatatactatcttcctgcaaagatatatccatgcccaaatgtgcagaaagttgcatgaactcggactgcatagccactttatctctcggcgtacccctcacagataactcaatacatgatttgggaggccgaaccgtttcatcgagcggaatacgtcccgtaagccgttgaatggcatcgatatttaatccttgctctgccacaatacgggtgacctcacctatctgacgggctgtaatacaacgccccaatatcgtaatgatatagcggttctttccctgtaaccccacccaacgcgtatattcctcttcactaataggagagaaacgaatgttcacatcaagctcataggctttgaacaggagatctttaagtatatcgcccgatttggtttcgtcagttttaaataatattcccaacgaaagcgtatggtgaatatcggcctgcccgatgtccaaaataaaagcatcgtaccgggctaacacttctgccaaagcggtcgttactcccggtttatcgtcacccgatatattaataagtataatttcggtttttggtttcattaaaaaaatctcttcctatttattccaacaaaaatagcacaaacgaaagcaggaacaaatcttattccgttttcactcttacaattacttcttgcaaagataaagagaactgatgaattttcagcataaatccatacaataacgacgtccaaatacagatattctcaaagccgtctattctcactgagttctcaaaagaaagaaccgaccaataaataaaattaatcagttctttcacacctacaaatacaagttacccgatataatttttaacgggtattaaatacatctgtaaaatgatccccatactgagccgtattataaataatagcccacaaagtcgcccacaatacaccacgaccataatactcattatcggtgacagtagccaatgcattacaagcaggggtccaagtgttggtatgctgggaatcccccaaaaatattattcgtcgttgcaaatcaatggataatgaacagccattgcctgcaacctccaacacgctagtcacgcctgtcggaacatcaaaagttccacttattccatctctataaaacatcgcgttaaaattaatttgttgagaaggccgaaaattactgaatggcccattcttaactatataatcccacacagggtcattcgtatgagaagttacccaagaggcatacgaaccggtattacctctatatttatatccccatgaggtaaatttagcaaatagtgcttgattttccgagttactattatccaaagaaacaatagcaaacctatttttattagggctattttccaaccacgtaatcaaattatcgtaataattggaaaccgtcgtcgcataccttcccgagaaaagaacattgacattatccgggatattagctcctacccctgcactattactttcgttattcggcaaagtcggcgttacaggcatataaactatcccttgcgaaccaaagaaagtagaataaatcccatagtcccgaaaggtactaagaataccatttccaagagcaccatatcctccataaaggtttgcgacactgatcgaaatgggtttaagcactttcctaacgattgcaatacgagaagaaacatctgtccccgccaaagtcaattttacatgatacgttatatctcgattcgcatctttatacaaaatcttaggcaattgtattttaaatttcgtacccatcgaatattccgatccccatgacatggcatcgcctttttcacccactaattttacggcataagtatgtactaatgccggttccggctgttccaactccgcaatccatttcattctactactaccttgcaaactaacgacctgcgtctcatctgcattctcagaaacataaagggtattccctacaatacctgtattaaaggacataggtttctgactgatagtaatcacatgagattttacattgggatcgtccaccaatgccaaataaagacgggcatttaaagtattgctacttgcgttctcttgctttgccgttacggtcaatcgattaagcttcaaatctttatcatcgtgaatatcttttatttcaaatgcctcggcgttatctccttcaaggacatatttccactgatttacagtcgttccatcggtagacagtcccggattgacaagaaacgtatttgtattatttcccgttatagtcaactctccatcatattcaaaatcaatcgcagtaaccgaaggtgtcaattcaaatccaggttctccactctgaatcaataacatggtactctgcaccgaaggatcctcttttagactaactaccaaaaaaccgtaacgtgggctggtagtcgcattggctgtatgagtataaatcggaataatattattggttgccttaccgctatcgtagtcggtcacagccgaagtcccagtttgtgcaaaagaaaagaaggcccctgcgcccggtggataaatagtcgcttcccaatctcccgatccttccacagcaatgggtggagccgcaaccccagcagtattagcaaagtaaggtatgctcttgggatttaatttcaaatagagatctcctccctctaattggactatatcaatcgtagctttcaaattaccaaaagaaagttctataataccactacgctggtcttttacattactcaatattgtggcagaaacggtcaaagttttaccactcaaaccgaccgatataccatcgtccaatacttttttgctgagagataaagtcccttcgccaaaagtaaatatacccaaactgtaacttccaccattaggtgtaaacatcactttttttgtgggtatcgctaatatattatctccatcgaactgcacagtaccatgactatccatatcccaatagttaatggaataacccagcgaagctatttcacccttatatgcctccaattctgtcgtatacccttcttttttaactgagttaatagtcaatttatatacattattacgtttaagagattgcccagagccaagtgggtgaatatttgcccgatgataggatacagtaccggaactactgtttctcacaccgataattaaacaagtcgtaaactcatcattctgtttgggtgatgctacataattttcaaaagcgtataattttccaaccagctcattgcctccggtcttgttctcaaatccataaagtctcgcaatacgctctgcatctttatcaaaagcattcggttctccgttccatacaaaaagagacgggtatgcattccaaaccgatacagtctcaatagtatatcccgccgccaaattgtatatatcaaaacgagaaacagcacgttgtaatacagctttaagtttagtatcttgcttacctttttttaatgaggcactcatcaacaaagcgtcgctttccagtggtttcgtagtatattccggtacatttgtatctgtacccgacataaacacttgaatttccgcttttgcctctttataattttttctttgaattacagatttccagtcggctaatgtttgagagccatctgtcggtaaataattatctcccatattagcaacgatcagaatatcatacggttctgtcatgctcaatccaatatccgaaaaatcaaataccatatcggtattcattaccagcggattctccggggttgcaattaattctttcagccccttaaaagttcctgttccagtactattcgattcgaaaaaaaacaaatcaagcgtcttcacattttcttccccagcttcgggagctattgccgaacgtgtagctaatccgctagtaggatcctgaacactaaaatttatgattaatttatcattttgcccagagaaaaatcgatcggcatcatcttctctacaagacagaaaaagggccattaccaaaagagaaaacgaccatattacttttttcatactatctatttttatgattatatatgtaattatttctccaaatcaatgtcaatatcgtcatctagttcccaatcgttcattcctttgtcatagcgaaatatttgtatttctaacctaattcttccagaaagcaatacgatcgtatctgtattggcggtagacgttgtcttatcaaaatctcttaaagcagttactctgagacttataggataaccatcggtatcatcgataagctcaactttaaaacgattgttctgaattccgttaggcagtgtagtaacagaaccattgatatcggttttaaatgccaaaagaatagcctgcgataaaatgttactttccactccgatagaagtcatcgaattcgtatctcgatataacacagcctctcgcttctctgtccacaaatagtaattaccacttgtccccatttgtccggcagtcatgtcccattcaacaatattgacattcagatgaacagatggttgtcccgcagccgtttctttatcggtatatccgggaccactaactgaattaatattaaagacatactttttatttcgtacaatctcaataagcttatcagcctcagagtcctcgaaatcaatcggataataatatttcgaccccttatactcagctccaactacaagacgagtgtgtctccgattttctgtttcggtctgggtatcattatcatataaatacagcttattggcaatagattggtcggagatattataatcgcttgattccaaaataagagcagttcccatatctactggggaatacgccacttgcactttatcatcgacgatattattcgaactgttacccaaaaaacctttatccggaacattgtacaaagtagcatctttcagtgtaaattctgcaatatcggtagtcacatatacatcaacagacgcaaccgaccgaataagactcaacaacggccaataattaattactccatctttcacctcttgtttttccagcattccccacatgggcaaacacgtaaatacaggagtattttgtaatagtctcttcggatcctcatctaccaactctttccgaaacacctcccagtcggctttccctatatattgactctcggttacctcatcgggaagcatcttttcaataaacgatcgacaattagcaaaaaaataagcatcataatctttaccaataggaagtgtcgtacgcaactttccatttattttaaaagtagttcgccaacaaagaaatttcccttctgagtcaaaaagcaatacatcaagattttcgacaatattttcattcggagtggaatactcggtacttcgactcactggatcggttacaatagatatttcaacttccgactcaccagaagaatagtcttcggaagaaggttcatcgttaaacctagtttggcaagaataaaatcctaccagtgtaaagataatcgataatataaataaatttttcatattgtcacctttttatagtacgatcagagctttacgaatctgccatgaatcgactgaaataattgcttcctgttgagttggtctaattaccacatctatccgtgtaccttttttagccttagtttctgtgtcaaccgccaatcgagctatcccattttccaaaatcgtaatgacgatattatcttccaacccactttctgcctccatagaggcgggcaatactttattattcgaaacatattcgtcttcgctctcaacataagtaaaattgtcttctattataacccgatcaccagattggtgacccttagaaacatgataagaatcagacgctcctgcaacagtcatactgagttttcccggatactgttttttaaaactattaccgtcttttatagtaaccgcaatactacataacattttttcaacctcaacattaataactttctcttctaatggatttgaatcgaacatcaaactccctagaaaaagctcctgcgacgagccgctatacgattgagagcgacttatcggtcgttcccccattgcaaatcttgctgtaaaataattatcttcattaaaaaacacaatcggggcctttccatctactctatcacccgataaaatccaagcaatcaaatagatacttccagtatatctttgttcaaggaaatagggttttcctccttttatttcttcgtaaggaatatgcctcatttctacatttttcccattattatcgtacaaatacaattctatatcatctgcaaccgaacgatcgaagttagccgtacttccctcatgcgtgaagaccaaactcaaagccccatcttcacaaccataatgcggcccctcacgagtacaccccatacaaaatatcaccaataataccagaattatcttcttcacgatacaatcgttttttatctaccattattcttggagtagtatttctactccaagaataatggcaatcagtctttatgctatttataaatctacatcttgtgtccttacatcccattgagccacctctatattgatggaaatagaactttctgtaggactaacgaccggcccttcttcctctgcctccttcggcgtagaccaacccacagttttaatatctttcatcgttatgcgataaatactattacggtagattttccaagcatcgtcttttaacaaattaactctccaataacgagttacgccacttacacctgtacccgagaacgttcctcgaacaatgaaagccactacttcatctttatcgaataccgttgcaaccgaaccgttaccaccttgcaaagtagtcggaacattctcatatacataaaccggtttatcataaatcgctggtaaaaaaccattcgtggtctcatcggcatcgtcttttttcacagaatacacagattcaaccgtttccccgtccatagaaaatgtcgtcttgaaattagtagctgtggcaaaacgcgtccaatcttcgagctccttatattcaaaagcacgcgattgattaattccattaataaccatataaccgtcgaaggtccatttcaaatcactcggaaccgtaccattttcacccaatcccaatattttaagcaggtcatctttgggagcagtaatttgatttgaagggtccaccttaggactttcaattttactcaataatcgacgaacagagagatttagcgtattcgtttccccctccacaacattaatcgtcccttctgccgccatagcaaatcctgtggaagtactgatatctgcacgagaatttgagccatctaataaaagctctttataaagactattttttttgaaatccgtcaatgaagccggcgcgggagaaggttcgcccaaattttgattgaccgcagtgagaacagtaagatttcctgcgtcgacaaggaacgtgtactgattattcgtggctaaaacttctggcttaaaatatttttgataagacccgtcagagttaaaaacaaaaaattccaacgatttgatagcgttttcatcggccgatcctgcctcctcacccgtttgagcccgagtaacggtacttccttttattttaacagtaatagctgcctttttaccttgaacaataggttcgttcatactattgtcagaatcgctacacgacaataatgtacatacagttatagcaactgcccataaatttttaattctcataattctaaaatttaattatgaagtagttttataatgattataaaagtcttttttcaatctctcgtctgcttccataaaaattgtacgtagacccaattttttgataaagcccaaaggttgattcttttttatgatagactccgactcttcggggtccgggttctgcaaaatcctaccgcaaacaggaacagttatcagtttagcttgtttcgtacacgacttgactaaaccttgaaaagataacaaaccgcctttcatccatttttcatatttcatcttttccctatacacgaattcttgtttatgtttgacgattttcatgccgtttctgtaatcggaactccacaaaaaagacattttccccttcttaccaactatgacaaacggaaggaattgggactgattaataccatcggatatcattggaatcactactattcgttcttttcccttcaaaacaaaccgttcaggaacacagttaaaactaagttctatactatctcctacaacctgtattcgtatttcggtgatagatagtttccctcgatgagttgtttcactagccatcgaatcaaaacaaacaagtaccagcagcgaaaaaaagaacagtatagtcaaagtatgaattatatatttcatcattcgtttatttattaatattatagattaatgaaaggccaacctttgtcggtcctaaataggttttagtaaaatgttccgacctcgtacaacaccaatttttgttattcgatttatcaaaatcaagatgtactatacctaaacccaaataggcttcgatcgcccatcttctcgaaagcatccaactatacccatacgtaaatcctgcacctgctccccaaccttcatacctatatcctttatcgaaaatatggaaaaacttatgtccgccaatattatattgagttgcaatagcatgaatcccaataaaatgtccacctgccggttcacaaaaccaatatctcaattcaggctgaatcagccaatgcacaatcttatcgttatcacctttctttcctttcctattccacggattatagccgccgattacattcacactcatttgtgttccccaatcgacctccaatccaagattcggagttgatgtcgcagcgtataaaagatttgttttgagactccaacgtaaacttttatgcgtcctatttttccaagaagactctacatcgatattaattattacactatccaccaacatatcatcattaccggcaatcatatcaatagctcgttctcccgattgttttaataaaaaagtatctttcgataccgatgtatttttatattcaaccagtttagaagaaagtgctgatgttatcttctctttatatcctatatctgccaaaaccgagagctcctcttgcgccactcccgagaaacaagtaaacatcacacctaaaaaagcgactaaaattttatacatcaatcgttttagcttctctgtaattgtatattgcattatcattgcagaattttaatcatcaattaatcattgtccatgtctcaccaaaaacattaaaaattttgaaaaacaaacatggacagattcatctaaatattattagccattaatcccaaaagagtctcatatagaaattaatatcttcgtattcacacctattcaaccctactataattgttttataatcccttatagcctattctaatggctctaattatctaacattcataaacattaatttgttctcgaaaaaacatttttaccgcaaaccgctacccagaacttatccttttagctcaattataaatagcgactcatcaccaagttcgacatctactccaaaaagttttattttatactaaaaatcaatcatttacgaatccaaaaagttaaaaagtgaacaaataatttggttaattcccgaaaaacctccaactttgtcccgattttatgggttcccggtagtgaaggaagcgtcctaagcaagaggaactaaccgctgaaaatcagtggggtctgccgtttcggtgcgataccctgacgtcagatttagtatgaaccataatacttcattatgaagaaaacaaagtcagttattggtatgctggcgttggttttattgttttcatcggctttcaatccagtagaaactggattaaaagaagggaaacaggccccaatgttgaaattaaaaaattcagagggagcagttactctcagggaattaaaaggccgatatgttttgctgaatttctgggccggatatgatgctccgtctcgtatggaaaatatacggtttgcccgagaaatagacaaaagtgaaatcgaaaacatcagtctcgtatcggtatcgttcgataccagtcgaaaagtcttcgaagagacgatcaaacgagacggactaaacaccgctacccaattctatgacaaagacggttctcaatcggatatattcgacaactaccgtctgaacaaaggattcgccagttatctgatttcgcccgagggtgtcatcatcgccaaagacccgaatccagaacaattgacaaaacttattcgtcaataatcaaaacctccgttatgcttcatttacataacggaggttttctctttctcccctaaacacttctcgaatttcggaacaacgcattccgactctacaaattatttcttcccattcaatcaccttaacaggagactttgaacttttatatttttcattacataacattgcgacagcaaacgatttacattatctttgcaaacaatttcgggaaaggaatccctataacccaaaggtcgcaacacagactgtttacttaaaatttcgttacaaatgatcatagccagtcagaaaaaaaaggaaaatattgccgaatacttgctgtatatgtggcaaatcgaggatattatccgagcttacgggctggatatagaccaaatacaaaagcatatcatcgattcttatgacttacccgaggaacaaaaaaagagcatgcgggattggtacgaatcactcatcgatatgatgcactcggagggtgtagaaaagaaaggccatctacaactgaacaaaaacgtacttatcgacttgacagatttgcacctgcgtttgctgaaatctacccgagaaccgttttacggagcagcatttttcaagactctgccctatatagtggagctgagagccaaatcgggagagggaaagaccggtgaattggaaacttgtttcaatgcgttgtacggagtattgttactgcgattgcagaaaaaagaaatccaatccgacacactgaaagcaattcaacagatatcgactttcctttcgattctcgccgagaaatacaaacaggaaaaagccggagaattggaactggaataaaacataaaatgcgatgactaagaaaattcttattacgggcgctaacggacagttgggacatgaaatgcggaacgcattgaaaggtaacaaccgtttcgaatgtatctttaccgatgtcgccgaattggacatctgcaatgccgaagccgtaaaacaaatcatagccgacaaccatatcgactatatcgtcaactgtgccgcctatacccaggtagacaaagcggaagacaatgccgaactttgcaaaaaaatcaataccgatgctgtcgaaaaccttgctcgcgcggctgccgattacggagcccgcatgattcatatctccaccgactatgttttcaacggaagaggttaccgtccttataccgaagatatggtccctgacccgcaatcggtttacggttcgaccaaactggaaggcgaaaaaatattgaccgacatctgtcccgaaagtattatcattcgcacagcatggttatactccccttatggcaacaattttgtcaaaaccatgctgcatttaggagaagaacgggaggagttatcggtagtcgccgaccagataggcacgcccacttgtgccgccgacctcgcacaagcaatccttgtcatactgcaagcggatacattcgtgccgggaacataccatttctccgacgaaggggtatgtagttggtatgacttcacagtaactattcacaggctggccgggatcacgacctgtcgagtgacaccgatacgaagtgatgaatatcccagtaaggcacacagacctttttacagcgtcctcgataaaagtaaaattaaaaaaacatacgggctgactattcctcactggtacgaaagcctgtcgaattgcataaaactattacaagaaacccattaataacgtgagtacacttacagaagaaatcagtaaacgtagaacattcgctattatcagccacccggatgcaggaaaaacgacactaaccgaaaaactacttcttttcggaggagctattcacattgccggagctgtaaaatcgaataaaatcaaaaagaccgccacttcggactggatggagatagagaagcaacgcggtatctcggtcgctacttcggtcatgggattcaattacggcgattacaagataaatattctcgataccccgggtcaccaagacttcgccgaagacacataccgcacactgacagcagtagatagcgtaattatcgtagtcgacgttgcaaaaggtgttgaaacacaaactcgcaaactcatggaggtgtgtcgtatgcgcaatacaccggtaatcgtgtttgtcaacaaactcgatcgtgagggtcgcgacccgttcgacattctggacgaattggaagcagagctgaaaataaacgtacggcccctcagttggcctatcaacatcggacaaaaattcaaaggagtttacaatatctacgaacagaatctaaacctatttacaccgaataaacaagtcgttaccgaacgcatcgaattaactgatgtgaacagtcccgaattggaaacctacataggagaacaagatgccgaaaagttacgtgccgacctcgaattggtcgaaggcgtctatcccgaatttaacacggaagattatttagctgccaaaatggctcccgtatttttcggctcggcactaaatatgttcggagtaaaagaattgctcgattgctttgtgaaaatagcgcctgcacccaaacccattcaagcggtagaaagagtcgtccgacccgaagaggaaaacttcacagggttcgtattcaaaatacacgccaacatggatcccaatcatcgcagttgtatcgctttcgtaaaagtatgctctggaaaattcgaacgaaatgccaattacaagcatgtgcgcagtaacaagatgatgcgcttttcgagtcccacggcattcatggcacagaagaaatcggtggtcgacgaagcttatcccggcgacatcgtcgggttgcccgatacaggcaacttcaaaataggcgatacgctcacctgtggcgaagaattgcacttcaaggggctaccgagtttctcgcccgaaatgtttaaatacatcgaaaacgatgatccgatgaagtcgaaacaattgaacaagggtatagatcaactaatggacgaaggtgtagcccaattattcgtcagtcaattcaacggccgtaaaatcatcgggacagtaggacaactacaattcgaagttatccaataccgattgctacacgaatatggagcgcaatgccgttgggagcccattagcctttacaaggcttgttggatagaaagcgacgacccacaggctctcgaagcattcaaaaaacgaaaacaccagttcatgagtgtagaccgcgatggtcgcgatgtcttcatggccgattcgaactatgttctgcaaatggctcaaacagattttcccaagataaaattccacttcacaagtgagttctaactacaatcacaaacaaataaataaactttatacctatcagacaaacccgctttttgcaggctttgtctgatatttttgttatcggactaattcaccctcatctctcactccatctttacaaactctctacgaaaactaaccttcttcataccccaactttctcgtctatcaagattcccctatattatataaaatacaaggaagaaagtttcagtcgatgcccacctatcacaccttcacctaagaaataaaagtatcattcatttaatatgataaatggtattttttttaattttacaagctaaaagaaaacaacaaaaaacaacatgaatgctatttttcatattatagataaatcaaattgggaacgcatcgcccattttaactattactattcgcaaataaaatgcaagtataatctgacttcaaacattgacatcacccacctcgttagatggcagaaagtcaataggtataaattctttcctacaatgttgttcgtcatcatgaaagctgtaaaccaaaacaaagagttccgtatgagtttcaatgaaaaaggagaacttggttattgggataaggtcgtaccatgctatacactttttcacaatgaaaacaaaacatttactgacatttggagtgaatacgatgaagattttaacatcttctatcgcaccgtgatagaagacattcatacttatggcaatattacaggtgttgtaaaagcacgtccaggacaaccagccaacttctgccctgtatcatgccttccttggttaagttttactaactttgcccaagacacatactcggaaagtcgttttttgtttcctcttattaaattcggaaaatattttgagagcaatggaaatatacagcttcctatctccgtctttgttagccatgcagtagcagacggttatcacacatgtaaattaatcaatgacatacaggaaattgctcaaaaattctttgcgtgatatgtgtactatataccaattcaccatgttctcctcttaatttttttagttatacgccctttgtataatactatttattcattttattcattgcaggcatacttcttacttgattgggacaatctattcttgattttcagcaaagtcgacaagtcttttctcgattactttttgcacttgtatatcctcgctcctatcgatcgtttttgaatgaagacaaaccatatcaaacggttcagaactattagtaaaactaactatacttgaatgctgactattgaactcgattacaagaacagtaaggaaaagttaataaagtcatttaataaaaaaatccccggaaagaaattctttccggggatatatacttggagagtgtttcaaaatttaattcctctctactgccaagaaggctctatttcaatcagaaacgattaaatacccaactcttttttaatcgcttcgattttagcatcggccgctgcattggctgcatcgtaatcggcatagttatccatcttgataccacgcacttcgatatagaatttgattttaggttctgtaccagaaggacggatagagactttggaaccatctgccgaaaaatattgcaagacattggaagttacaggcatatcgagtttcgatttcgtaccattcaccatatcggtagcttcaagcgatgcataatcttttataagaatcacaggagaaccaccgagttctttcataggattctcacggaaattcttcatcatggcgactatctcctcggctcccgatttccctttacgaacgaccgagatacccttttctttggaatatccatatttaatatagatatcctgcaacatttggtacatagtcatacctttgtctttcgcccaagcggcgatttcagccattaaagaaatagacgatacagagtctttgtcgcgaacgaaatcttcgggcaaaaatccgtagctttcttctccgccacctatatagcgggctttgccttcgttctcacgaataacagaagcaatccatttgaagcctgtatagcaatcgtacattttgaatccgttctgctcggcgatcgtcttgatagtctcggtcgtcacaatagtcttaacgatatattcgttacctttcagcagccctaattctttattacgggtcatcaggtaattgaggaatatcatcacaatctgattaccattcaccaaaacgaattcacctttatcgttacgcacagcgataccgatacgatcggcatcgggatcagaagccatgaccaactcggcatcggtttcaatggctttcttaatagccatatcgagagccgcaggttcttcgggattgggagaaacgacagtcggaaaatctccactcacaacatcttgttcgggaacgtgaatgatgttggtgaatccgaagtttttcaacgaagcaggaatcaacttcacacccgtaccatgtataggcgtgtatacgattttcatatcgtgatgatgagcaatggcctcgggactaagcgatagagtcttaatacggtcgagataccgacgatctatttcctctccgataatctcgatcagctctgcatttccccggaacttcacatctttcaccgaagtgattttatttacttcgtctatggtattcttatcgtgaggtgctatcatctgtgccccgtcgttccaataagccttatatccattgtattctttgggattatgcgatgccgtaagtatcactccactctgacaccccaactctcgaatggcaaaagaaacttcgggagtaggacgcaaagcatcaaacagatatactttaataccattcgccgaaaaaacatcggcagcgacctcggcaaatttgcggctgttgttccggcagtcgtgaccgatagcaacctttatctgaggtaggtcggcaaaggcctttttcaaataattggacaatccctgagtagcagctcccaccgtatagatattcatacgattcgttccagttcccatgattccacgcagaccacccgtaccaaattcgaggtccttataaaacgcttctatcaaatcggtcttatcttcgttatcgagcatggcacgcacagcggcctttgtttcttcgtcatagccatcgcccaaccatatttgagctttggcggtcacctgtttcaataaatcttcatttcccatatcgtaaagaattcaatagttaattatcttctgtcacaaatttagttatttcaacgagaccaccacactatttaagcaaaaatttctcattaatttaacattcagtaatccaagagctacctctctctcctaaacaattcccgacaaggctcaatacttcggaggcgtttcgagaaagcgatcgcccgtctgccgcacgatttcttcgtagtactcttgggaatatccggggaaaagtggagaatcgggcaatccgtaaccattatccttgaattttccattttcttcttgctttacatttccatcgaggaatttcaccataagatactcacctaacttcttccaacgagcggtcgaggcttcggcggcatcgcaactatattgcgtgaggtaggcaatagcctcctggggagaggtcgcatacaactcgacagcagccttatcgaccgccggctgacggagattcaacgaggtttcgacagccgactggactttgcgaatatctcctatcataggctcataacgagcataagccatattcgccacccaattatgaatccaaaaagccgaggtccatgagaaatcatacatcgatccattctccggactaaaacattcgggaacctgtgtaataccacaatacatcgggatataaacacatgtattggcatcatcgactccgaaccaaagtacaccaccgacaggatcgggcaaccaattcctcatttgtccgactaacgtaaatccggtctgctgcgtggcaatggctcgttccatgcagtaggatttgccatctacctcgaatgacatggggcggaaacgataagggactttgaatggcccagcccctacatcttgcgtcatatcgaaaggcgtatcttcgaaatggtcacgcatagcctctttcatatcttgtacagataactttcgcgagggtttaacataaagcggaaacggttcagccgattctccattgacatagggcaaataattgtccatcgaactatcgtacttacggaagaaagaccacacccgagcatcgcaagctctcaaagctccgaaatcggcgggtgaataggctcgcgcaaaactgaaatctttattcagcccatcaaaataccccatctcccgagcaaaagaaatcacatcgggagagtacaggcaattctctttatcgtccataggaatcttgtgaatacgaggatagttggcatgaccggcgatacaatcgtcaggaatacgaaccgccacccaaacggctccccgacgtccgggacccttgccgatcaagtccaaaatccatgcttcgttgggatcggcaatcgtaaacgattctccactactataatatccgtatttttttacaagtccggtcattacctttatagcttcgcgtgcggttttcgcccgttcaagtgcaagttgcatcaacgagccataatcgataatacctgtcgtatcgaccaattcgggacgaccaccccatgtcgattccacaacagtaagctgatgttcgttcatattgcctatcacggcgtaggtatgttctacctgttctatttctcccaatggtttattcgtatcccactctacaatcgaacgcatagagccctttggccaatcggcagcaggagaagaagtcaaagctccgtacaaagtatgagagtctgccgaataagtaaccaatacactaccatcgacagtagcctgcttcccggcaatcaatcccgtacaagcccacacgtggacaaaaaatcctaccgtaaaaaaaactaaaatcgcaattttcttcatatcaaataatttttatttaccacacaaaagagttcgtataagactgctcgttgccacacatatcggaaaccacaatgtgcaacgtatgctcactacctttttttaccctgttactttcgagacgatatgaaattctacctgtctttccgtctaattcgaacaaaacaaattgcccgtcgatctctccccgataacttttcaaaccactttggtcatcgcttattttcagaacaacttttccctgggtcgaccatttatcggggacaatcggaagtatcgtcgggggcaatgtatctaccaaaacggcataagacccgaactccgtaattttagccttataccaaccatttgcatactccccgcaaaccggataggatctatcatcgtccaaacgaaccaaataatattgccttttatctgacaatttatcctcggtcaaccgtacagaaatttcggcagctttatgcaaagggggtacagaaggtgcaataatgtgaatatcggaataatattttttcgaaggaatctttcttctcgtaaaatcgagattttcatacaaagctccggccggtacaaaaatgccaaaatcgtcttttttatagagattatctactgcataagagaaatatatcccctcttttttagggagtggaggttcctgcaattttccaatcaatgaaaattcgacagaggaactattcccgtcataatcggtcaaaacataccgacaacgataggctcgctcctcatcgacatgaagaattcctctattttctacttgtttataaatagacttcaaccgattacccggtgcaatataagtgcgcataatctctccttcttcggcaaagctattaatataacgagtctcgtcaaacgaataacgatagatatatgtcgaaaaaaacagactgtcatcgatatacaaatcgacttgatggacaccatatttattcgtcgtacccgtcattcgatcatacgcctcgataccaaacgatacatcgccccataccggaaccgactcccctatcgagtaagaaccggccgaagcgcgcaccgcttttctttccgtacgacgagccgtatttcccatcaccccttcatgcgtataaaaaacgagtttacgaacttcgggagctacatcgtctgtgattaaagaagataaccattcctgaggatccatcgggtcttgcgtatcggtatcccgtatatccaaatgtaaatgaggaccaccagacgatcccgaatttccgctatatccgattatatcgccttgtgcaacaaggatttcaccttcggcaaattcacaatcgatagaaaaatcctcttgctcatactgctgacggcgaacaatttcatcgataaaaggcgcaaaccggtccaaatgtccgtaaaccgtagttaaacccgacgagtgattgatatacacagctctaccaaatccccacggagaaacaacgacccgagaaacataaccgtcgtccatagcatatactggtaatccgatacgtccttgtgtcttcaaatcaatccccgaatggaaatgattcggtcgtaattctccgaaattagcactcatcaataacggaattttcaaaggtgatatcatctcacctctactcaccgttaaaattaaaaaagaaaatatccctaaaaatataggacgtaaatacataatattcctcattcctttctataacatgcaaataatataaaagatcaggcttgaaattgccggaacgcaacttatctgtatccccatcttcgcataatgcaaagataacgcaagcgggggcaatatgaaaatttaaacaagttcttatccatacaattttctattttttatagttcgaaaaaatttgaatgtaactataagggttatacattctttttgtgtcataataataaacaaaattcaaaaagctcaaaaccatgaaaaaaatctcacttttatctattttcatctttcttgttctaaattctatatttgccgttacttatgataatttatatgtggtaggcaatgcttgttcggccggttggaatccagacggagcactcgtcatggttcaagaaagtgaaaatacttttacgtggagcggcccattaaaaaaagacaacgggaatcaagaacgatttaaattactcacagcacggtcttggacaacctcactgacttgtaacttggaaaaagcaggccatcaaataattacttcgggcggagagtatgatttatacataaaattagaaaccgacggtaaaccggataacgctttccaagtagcggaaaccggaatatatacgatagaagtgaatacatcgtccatgaagatgaaatgcaccaaaatcgccgattatgaagatcccaatcttgtatttaccaaagaaacattccattcaacctcggaagggtcgctaaattacaggaaattggaaccaccaaccatagaaaaagggaaacagtatcccttagttattttcctgcatggtgcgggagagagaggctcagacaatgaaagtcaactgagatacggttccgaaatgttcgcaaatccccaaaaccgaaaagattatcctgcattcgtactattcccacaatgtcctctgtccaatttttggccattcgagtcacaaccggcctcctatgatgctacaactttcccaatcgattatccaacctccacaccgatcaaactggtaaaagaactcatcgattcttaccttcaaatggaagaaatcgataaagaccgtatatatatcctcggcatttcgatgggtggcatgggtacattcgatatagcctgccggtatcccgagactttcgccgcagctatacccatttgcggcggagtgaatgtagaaagactagacaacaaggtaaaaaacatatattggcgacttttccacggcgacgcagacggagtcgttcccgtaaacaattcccgccaagcctaccagaaacttacaaatatcaaagctgacgcagaatatatagaagttcccggtgcaagccatttcgtatgggacgaggtttttaaaagagaagactttttatcttggatattcgccaaaaaacgtcaatcgacaggaggaagcgatattgaaacgagtaaaaccgatacatctttacgatgttattgttataaacaaatgttgtatatcgacacgaacgatcaaacgccactaaaagccaatgtatatacgacatcaggttcgctggttcattcatcttgctacaacagttcttctatcgtttcacctctcacctcattgaaaccggggatttatattatagagattcttcaaggagagaagcgataccattcgaaaatttcgttataaacttccctgccaaaaaaacttcttcttacatacaataaacgaagtccgaccgatatagattcattatcggccggactgttttacacgaatccaatgcaactaattatcgtccggtagcctgcaaataggctgtaagtttctgttggtaagccgtacatgcctcggcgtactgatcatggctttgctgcataagcgactgagcatcgagcaaatcggacagagagacagtccccgccttataataatcgttattgagacgaagattttcggtagaagattctatggatttctcggaaagaagcacttgctgataggcttcctgtaaatcgttccatttgacttctatctcaaccaacatcatttcccgggaatcctgccgggtattttcggcttgctgcttttttattttttcccgtttaatggcgtgcgaacctccccaccatgaagaaataggaaccgacacactggcaaaaatcattccgaaatcggtatctttttccatcaaatcatgataaatatacccgactcctacccccacagaaggaagattttctcctcgcttcatgcgcagttgcaatttagcagcctctacactcttatcgagcagtttactttcggcacgattttcaagtcccgtctcgggggcaacataatagtccaacggagatacagccgaaggaaaatcatcgaaagcaatatcgaattcactcttatcgacacctataagttggcacaatagcatctttgtcactgacaaaccattctctacttttaatcgattcgccataatgtcttgctgttgcaactccactcttaacaaatcgtttcgtgtagtaagccccgcatcaaccgctgcttttacatctttatatattcctttgagttgagtttccaacgtctccaacgtacgcaacttctcttttagtgcgacaatctgccaataatattgattaacagaggcttctacctgatcttttgtaagagaaagctgatattcactcacttgttttcctatatttgccaacttattcccattaacaatgcgaccacccataaaaacaggttgaaccaaagtcacccctgccgtcttccctttcttcaacatctccatagataaaggcggtattcccggaaccggcagtgccatatccatctgagccattccttcactggccttgaaaatcgcacctaccgccgacacattcgggaaataattggtaaaagcctctttggaagtttgtttggcaacctcgacttcaaaacggctgtttttcatttttgcactattttccaatgccaatgttctacattcttcgagtgtataaagtttctgcgcatttgaagataccacgcttaacatcaaacataacgcaggatatataattcgatttctcataattgttctttctttcaatgatttatacttttgcgatcggctctgctgaatattaaccaataggctacgggtaatatcgttacagtcagtaccatagaaacaatagtcccgaaaaacactaccgaacccataggggaccacaacggactaccgccaagaatcataggaataactcccatcgatgcagcagcagaagtaagaaaaatagggcgcattctacgcttcgctgagtgcaaagcggcttccctaaccgtcaaaccttctttttcccttagctcatcggcatagtcgagcataataatgccgttacgtacaaggatacccatcaagctcacaatacccaatacggctgtcacactcacatcgagtcccattacccaaatgccgagagccgcacccaatagacacaatgaaatggagcccaaaacaagcaacgccatattgattcggcggaaatgaaacagcaaaataaagaatataacaacaatggaaataaacagacctctcaatatcatatccaacatctcattgtctgtctcctcactaccaccgacttcaaaatcaaccccatcgggcaaatcgattttttcaatcgcctttacgatctccttagtcaacgcagccgcattggaaccctcctttacatcggattgtatcgaaatagacggtataccgttacgatgcgcgatttgggcatcgtgccagtcaggctcaatgtcggcaatctgccttaccgggacagaaaccgtacccccccatgccgatacatattgattgcccacatcttcatatgaaggttctatattgccaccatctttcaggaccacatcgataggataatcgccgtcccatacggtagttaccggcaacccattccccaaatgcatggacaaaccggtcgataacaatgccttgttaatacccaatcggctcatttcgtcgtctttcaatcgcaacgatactccgggaagttgcccttcccaattatcatgaaccagcgaaagtccatcaaattcggacattaccgactttaccttatcggccgccaatcgcaaactatcccgattattccctttcactctcatttcaatcggataggctgcttcggaatattcgagttgtttaaaccggactctgacattcgggaagtaattgagatatttatccttgtattctgcaatcatctcttccgtagctttattaccaatggtattgacaataaattgggcataattagaacccggcatttgaggagcataactagtatggaaacgaggagaaccgccacctttaaacgaagctaccgaaacaactcgactatcttgccgaagtatggactccaaactatccgccacagcggctgtctgttcgagtgccgtaccaaaaggcatatatatttccaccgcaaattgattacgctcggcaaacggcattaacttcatcggtaatgataaaaatataacaacaccagcaacaatagaaagaagtcccacccccatcgtccgaatcggatgagcaaagcacttaacaatcaatttgtcgtaagaagattgaagaatcgtcaagaacgaacgacgttgctttttctcctctttgggctgttttctaaaccccgtatgaataaaatgatattgtatgtaaggaactagcaaaacagctaccagcaaggataaaaacaaaataatagttatcgcccacgggaaggattgcaaaaaatcgttgatcattccctgcgaggttatcaaaaacgggaaaaacgtgatactaatcgccaatgtagccgagaggatcgatttaaagaactcttttgcactttctatcgcagcagtccaacggtctattccgctatccaatttttccatataacaatcgataatcactatggagttatcgacaatcatacccaatgtagcaatcaacgccgccaaagtcaccgtattcaattccaatccacaagcataaaataccaacagggacagaaaaatagtaataggaatcgtcgatgcagccaccgaagcgaccctcaaaggcattaacagcataactacaataataaccgcaataatagcgatcaacaactctctgaggaaagtcgtcactgaatctcccaccacctgtgattggtcggtaatacgaaatatagaaacatcatcgggtaattccttctcatattcttccaataccttattgacgtcctcacccatttgaacgatgttgttcccctcgcgcatctccatagagaggaccaaacatttcgttccgttgttcgtaatgtaagaatccggctcggaatattcccgcacgacacgcgccacatcttttagacgtataacatgcccctgcggatcgctaaaaattatttgatcagccacatcattcacacaatcatatgcctcggatatgtgaatgggagccacaaacttgctattatcaaccgccccgctcatcgtcgtaaaaccttgcgctaacaactttgttgctaatgtcgtgttaccgatagcatatcgggcaagtttcgcagggtcgagataaacacttatctgttctttctgcacaccgaatgttcgtaaattacttaccgcatcgatactccttaatcggtctttaagttcgtcgagataattttccagttcccgataggtcttatctttcgattcgatcgttatcaacatggctgacgtatcgccgaagtcatcgttagtaaccaatgccaataccccggtcggcaactcggatttaaaaaccgcagcccgatgtttgaatttagcccaaaattcatctttatcggttatatcgtcgttcaactcgacaaaaacgatcgccatgccatctcgactgagtgaatgggtcttagacttttttacttctttaaactcaaaaataaaatcttcaagcggtttagtcacctgctcttccacctcatcggaagtggctcccggataaacggctatcactactccctgacgcaccgtaaaaacagggaattcctgtttgggcatctttatcaaagcatatatacccaagaaaaacatcaatgaaacaatcagaatgacaatctgacgatatttcatcgcagcttctataatacctccttttgttttcattgttccgatactttcatattttcactcactttcgatgcaccctcgacaatcaccttatcaccgactgccaaaccagaagaaataatgacaccattccccgacaaagcgccaaccgatacagtctgtttcaccgctaccccgtcgttgcaaagccaaacgaagtgatcgccattataatctacctgtacaacagaattgggaatcactatctgcgaattgttccgacttcccatgttaaccacgcacaccatacccggcaacaactctccctgccggttttctatccttgcaagcgccttataagtgtgtgccagaggatcggccgcaattcctttttccgtaatctttccagagaaagatttaccacccaaagcagctactgtaactgttacatcggctcccatcttcacatcggcaacttcattctcaggaacagaaatattcacattcacccaatcgatcttcatcagtttaaatgccggtactcccggaagcacagtactccccgtatctatacttttctgagctattatccccgaatatggagctcgcaactcgacatctttcaaatttttcttggctatttgctccatactacgagcctgttgcaaagaactttgaacctctacccacttaatttcgggtaaacttccgctcttatgcagttgctccatacgagcataagcatcctcggcttgtttcaaagtagacaatgccgcatcataagtgctttgtaacgtagtctcgtccaatcgagccaacagctcgcctcgctctacccgttgaccttcttttacatatatacactctacataccccgggacttgaaaactcaacgaggaagaagattcgccctcaatttctcctatataactgcgagtatagactccttctcgaagagacaccgtccatgtcttcaccggaatctccctgacagctcgttcttccttactcgaagacgtacatcctatactcgtcattgaccataccgccaaaaacaaataagcaaatgctttaccattccttttcatacttttctccattaaattttgatacaaagatgacgcaaagccctccatcgacaaagtcctctttttcacagttgatgttctaaaagtcgtatttaaataatattcacagctaaaattctaagttatttagttacatttgggcaaaatatcgtatttatggataaaaaaggcatcgaaagtttcactcttgcccaactttcgaaattgataaaaagaaataatcccacgggattagatgatgacttcatcattatcggagaaaatttaccgaacaccgaattgttcaaatatccttgtcgagttgatgctctggtagctgtaatatgtttagaaggagaactaatatgcaatattaatttaaaggaatatcgcatcactaccaacatgatgattataaacactcctgaaaatattatacaggtaaaagatataggtaatcgtaaattttatggaatagccgtttcaagtgctttcttcgaacaatctttcctcgacgcacgagacatgattcctctatacatgcaaatacaaaaagaaccttgctttcatttatctaacgaagatactgatattttttgtcagtttatctctctcatgcagctcatttgccacacacaagatacacccaagaagactgcaacgctcctaagactcggttctgctcttatgtataaaattcatgacacgatacttgcccatgattcaccctccaaaaatgaaattaaaatgagtcggcaggaaatctttttcggaaaattcatcgccctactcacccaatatcacacacaagaacgaagcgttactttttatgcagaaaaattgtgtatcacacccaaatatttttcgactctgataaagaaacaaacaggaaaatcagcggctcaatggatcgatgattatgtaatactcgaagccaaaaatcttctgaaattttcgggtatgagtatacaggaaatcgcctatcatttgaatttttcgactcaatcgttttttgggaaatattttaagcaccaaaccggactctcccctagcgaatatagatcaagcgaataaattttttcatacacccaccgagaaattactttgctttttggaaagaattacctatcgattttataatttatccccgcacgtcgcgcctgtgaatgctggaattcccgacgaatacgatataccttccctcctttacgcaatcgggctccggtttggtgaaagctaaacgggatatcggctgctatacattgtcggcgtatatccaacacccaatcataatcgcaaaccctcgaatccatacccgactctcctccgaccgatacttcctctatatcgtcatcgagatagccagacaaatccaacgctcctaacaagggagcacaaaacaatagtttatgccgtataggcaacgaacgaaaaagaggtaaccgataattcaccctgtcttgattttctacggtacaagcaatagcgacatggtcataaccatcgccccaatcactgggcaaagatactctgaaacggtctatacgtttcgtcggaattagaaacgatagatcacagcgttccctaattatagcccatgcttcggctctccattcatcggcttcttcaagaaaaaaatcagaagtaaaacacgtatataccatttcacccgagggtacacgaaaatcaccgttacgtttacgacgcaaaggtaaatcgaaagctgccgtacgtgtcacgacgctactatccttatcatatcgactatcttgcctatatacataacaatgcctacacccttcacttattttatgacaaccatgccacaaattccacgaaaccgacatactcacactccctatttttttgcaaaggcagtctctgtcatacagaaaattaccacaaatataccaagacacagccctgcattttatgcaaagatagcgaaaggtgagcgcagaggcaaatagaattcctgtttccaattcgaccatgccgaaccgtatcctattttgtagttacaaagacacaaaaaacgaaggaggtatgtcatgataacagacatacctcctccactttttattcaatcatgtaattacgataagaatccaagtagaacaccggcagccacggccgagcctataacaccggctacattgggtcccatagcgtgcatcaacagatagtttgtcgaatcgtattcaagtccaatattgttggaaatacgcgccgacataggtacagccgatacacctgcattaccaataagcggattaatcttcttgctcttgggcaatacaagattaaatatcttgacaaacaacacacccgaagcagaagctatgataaatgccatgaaacctaaggcgaaaataccgagtgtactgggtgttaaaaactcggatgcttgcgtagatgctcccacggtcatacccaacagaatagtcacaatgtcgcacaaaggaccactcgccgtcttagccaaacgagaggtaacaccgctttcacggagtaaattaccgaagaacaacatacccaacaacggtagacccgaaggcactaagaagcaggtaagtagtaacccgataatgggaaacataattttctcattctgagaaaccgcacgcgccggtttcatacgaataacccgttctttcttcgtcgtaagtaacctcatgataggaggctgtataaccggaactaaggccatataagaatatgccgaaaccgcaatggctcccataagattcggcgccagtttcgatgaaaggaatatagccgtaggaccatcggctccaccgataatggcgattgcaccagcctgatcgggagcaaaaccaatagccaaagcaaccatataagctccgaaaataccaaactgagcagccgcacctactaacatcaatttgggattagcgataagcgacgagaaatcggtcattgctccaatacctaaaaagaccaacggcggataccaaccggcactcactccctgataaaggatattaagtaccgagccttcttcataaataccaacttcgagaccggcatcgattttgaaaggaatgttcccgatgagaataccgaaaccgatgggcacaagcaacattggttcgaaatttttctttattgccaaatagataaagaacaatccgaccaatatcatggccaaatgagggagtgtacaattggcaaaacctgtatattcccaaaattgaaccaaattatctcctaagaaatctataaatcccatagccttattctattataataagttcggttccttcgagtaccgaatcacctttatttactttgatggctgtaactttaccactcttgatagcattgatattattttccatcttcatagcttcaagaataagcacagtctgtcccacattcaccgtatcgccaatttttactaaaatatcattgacaacaccgggcagcggcgattttacagcatctgcaccagaacttacagacgtgggtttggaaataacaggttctcccgtagccgtacgaggagccgaagagggtttaggtgcactcacttttacaggtgcagcttcttccatctcgacattataaacagtaccgttaacctcgacatgggctatgtttttttctatctctccaacggaaactttgtaaagatttccattgattttatacttatattctttcataagattttaatcgttattttgagaattactttttattgggaacttccctcaaagaataaattttagagttccacggcgaatacgctttcttcactttgtttatggttagtatagtatcttccacatcgtgtacttcgagatgttgatataaagccatagcaatagcggcatacacttcgcccgattcacgaccaagacctttttccttagcctcttccttatcggatattccgtgaactcgcatagcattacgctttttaacaaacaccgttatttgaccaatcaagcggaacatcagatacaacatcagcaatccggaaaatacaacagccatcgccataatagccatgcctacaccaaaaggatcatgttccgaaaacatttcgatcttttcattcgagtcgagcgtaacgttattcgtacttggagtcacataccccgatgtctcatcaccgcctttgatgatccactgccctacaccatcttcgatacgagcataagagtggtcggcaggaataccggcaggaactgtcaccgagtctatcagatcttttccattagcatcataaagcccaatccaattatccttattgggatccaatttaaaattcacatgaaaagtccctctattgggcatatcatctgcccaaaacagcaaatgctgacgaggaggcatttctgtaagtacatcgcctttgggaataggatactttttgggattattcctatcgtttgtcaaatagcaactgcgtatatcgacagtaccgaaggtcgtattaaatatctctatccaagccgattgacaaccgtaatcgtcctgataattcgtctcattcgtaaccaagacttcattaatacgcaatcctttgcggccctgtgcccacaccgaagacatcgtaaaaacggcgaacaggaatacccctaagatttttttattcatcgcttatatactttaatgtattacaaaggaatatttccgtgctttttagccggatttgttaacttcttagtctgtaattgctgtaatgcacgtataatacggaaacgggtattacgaggctcgataacgtcgtcgatatatccatacttggccgcattataaggattagcgaacaacttggtatactcggcttctttctcggccataaatttagctggatcctcagcttctttggcttctttggcataaagaacttccacggctccggccccacccataacggcgatttcggcagtaggccatgcgtagttcatatcaccccgtaattgcttacagctcatcacgatgtgcgaaccgccatacgatttacgcaacgtgatagtcaccttaggcacagtagcttcaccataagcataaagcaatttggctccatgcaggatcacaccattgtattcttgtccggttcccggcaagaaacccggtacatcgaccaaacttacaataggaatattgaatgcatcgcagaaacgcacgaaacgagcagccttgcgggaagcattactgtcgagaacaccggccaaatatttaggctggttagcgacaataccgacagattgtccattgaagcgggcaaaaccgatgatgatatttttagcataatctcgctgtatttccaaaaattcaccattatcgataatagcaccgattacttcgtacatgtcgtacggacgattagggctatcgggaataatttcgttgagagaatcctctaaacgatcgataggatcattacaaggaaccaaaggagcttcctccaagttgttctgcggtatatagctgatgagtttacgaataatagacagagcttcttctccattctcggcagcgaaatgggctacacccgatttggcagaatggacttcggctccacccaaagcctcttgtgtaacatcttcgcctgtaacggtctttaccactttcggcccggtcaaaaacatatatgaaatacccttcgccatgatcgtgaaatcggtcaaagcaggagaatataccgcaccaccggcgcacgggcccaatatagctgaaatctggggtataactccagatgccatgatattacgttggaaaatctcggcataaccagccaaagcattgataccttcttgaatacgagctccacccgagtcgttcaaaccgatacaaggcgcgcccattttcatggccatatccatgactttgcaaattttcaaagccattgtctcggacaaagaaccaccgaacacagtaaaatcctgagcgaaaacataaacaaggcgaccatctatcgtaccataacctgtaacgacaccgtcgcctaaaaatgattttttctcttgtccgaaattggtacatctgtgtttcacaaacatatccaattcttcaaaactgccttcatcaaggagttgcgcaatacgttcacgagccgtatacttgcctttctcgtgttgcttatcgatagctttctgtccaccgcccaagcgagcctgagcgcgtagttctatcagctcttgtaccttttcaagttgattgctcatattcttatttattaggattttcacaaagttcggttaatacgctacaagtggatttggggtgaaggaatgcgatgttcaacccttcggctcctttgcggggagctttatcgataaggcgtacccctttggcttctacttcggccaaagcattggcgacaccgtcttcgatagcgaacgccatgtgatgaattccctcgccgcgtttttctataaatttggcaatagtgctgtcctcgcttgtcggctccaataattcgattttggtctgccccactttgaaaaaggccgtcttcactttctggtcggcaacctcttcaatagaatagcatttaagacctaaaatgttttcataataaggaatggcttcttcgagactctttacagcgattcccaaatgttcaatgtgagaaatgttcataataattagtatttagttaactatactttcgataaaaattcctgtttataagattggcaaatttacatcatttcggtttaataacgaaataaatcggggaaataagtacaaacagaaccaacccatacccgctcgtttgcgttttttagataaacaaaagagcaaagtcaatatgacaaatcgacagcattactgacacaggacaacaaagcgctttggaaaagtctgacaaaaaaaacattttccttgctttcgttttttggcataacatttgaacaagatgcagtgtctataaaaaaacagacagtaaacaaaataacgaattaacaataaaagatataaaattatgggaaagattattggtattgacttaggaacaaccaactcgtgtgtcgccgttatggaaggaaccgagccggtagtaattgccaacagtgaaggccgtcgtacgactccttcgatcgtggctttcgtagatggtggtgaacgcaaggtgggagaacctgccaaacgtcaggccatcaccaaccctacgaggactattttctcgattaaacgtttcatgggtgaaacattcgatcaggtagctaacgaaatttctcgcgtaccttacaaagtagtaagaagcgataataatacaccgcgtgtagacatcgacggtcgtctctattctccacaagaaatttcggcaatgattcttcaaaaaatgaaaaaaacagccgaagatttcttagggcaagaagtaaccgatgccgttattaccgtaccggcctattttaacgattctcaacgtcaagccacgaaagaagccggtgaaatcgcaggcttgaatgtacgtcgtattgtcaatgagcctactgctgccgcattggcctacggccttgacaagtcaaataaagacatgaaaatcgccgtatttgacttgggtggtggtacgttcgatatttctattcttgaattgggagacggtgtattcgaagtaaaatcgaccaacggtgatactcacctcggcggtgatgacttcgaccacgttatcatcgactggcttgccgatgaattcaaaaaagacgaaggtgtcgatttgagagaagacccgatggctttgcaacgtttgaaagaagcagccgaaaaagctaaaatagaattgtcgagctcgacatcgaccgagattaatttaccttacattatgccggtgaacggtgtacccaaacacttggttaaaacattgactcgtgccaaattcgagcaattgagcgaccgattgattcaggctactatcgaaccgtgtcgcaaggctttgcaagatgctggtctaagtgcctctgacatagacgaagtaattctcgtgggtggttctactcgtatccctgctatacaagcgattgtagaaaaattcttcggaaaaactccttcaaagggtgttaaccccgatgaagtagttgcagtaggtgctgccattcaaggtgcggtattgactggcgatgtgaaagatgtattattactcgatgtaactcccctttcattgggtatcgaaacactgggtggcgtaatgaccaaattgattgacgccaacacgactattcctacccgtaaatcggaagtcttctcgacggctgtcgacaaccagccctcagttgaaatccatgtattacagggtgagcgccctatggcaaaagacaacaaaactatcggtaaattccatttggacgggatcccggcagccatgcggggtgtgcctcaaatcgaagtcacgttcgatatagatgccaacggaatcttgaatgtatcggccaaagacaaaggtacaggtaaagaacaaagcatacgtatcgaagcatcgagcggtttgaccgacgccgaaatcaaacgaatgaaggacgaggctgctgccaatgctgaaaacgatgcaaaggaaaaagaacgtatcgacaaactgaatcatgccgatgctctcatcttccaaaccgaaaaacagcttaatgaaatgggagacaagattccggcagacaaaaaaagcgctatcgagtcggctctggctaaattaaaagaagcccacaaagctcaggatattgccggtatcgatgccgcttcgaccgaattgaacaatgtattgcaagctgccgcccaagacttgtacaatgctcaggctcaacaacaagctgccggagcacaacaagctcaaccgggtgcagatgcttcacaaagcggaaataatggtaaagatgttaccgatgtcgatttcgaggaagtgaagtaagttgcaacaaacaacgataatgaaaaaataatctgtgtagtagttacacagattattttttttaacgtcctcttccttcattccattatccccaataatccaaaattcagactctaaattctactctcacacgaaagctaaggataataaagggtggttaattctcgaacctttaagacataggttcagcctccctatccattgttatattcctcgttttcttatcaatatttttcaattcgaaaaaatacagggaaaacgttcaaaatgaatttaccctcgctcctaaaaaattaccgggcctatttgctttttgcaatagacccggtaacattatattagattctatacttcccaattacagaaggtactgcgaactgatagacttattctcgtagacccgacgaatagtatcggcaaacaagtcagcgatactgaggatatgtaccttatcgcattttttggtgtaaggaatactatccgtgaaaatcaattcggtcatagaagagttttgaacccgttcgctggcagggtcgctcatcacggcatgagaagctatagcacgtaccgaaagagctcctctgctcatcattaaatcggctgctttggttatcgtcccggccgtatcgaccatatcgtctaccaaaatgacattctttccttctacatctcctatcactgtcatgctttctaccacattggccttagcccgttgtttatggcataaaaccaaaggtacacccaagtatttggcataagtactggctcgtttggaaccacccacatcgggggtagcaaccaccatatctttcaatttcaaagactgaatatagggaataaatacagacgaagcatacaagtggtctaccggaacatcgaagaaaccttgtatttgatcggcatgcaaatccatcgttataaggcgattgatacctgcaacgctcaatatatcggccaacaatttcgcagcaatggaaacacgtggcttatccttgcgatcttggcgagcccacccgaaataaggaacaacagctacaatcgacttggcagaagctcgtttggcagcatcgatcattaataacaattccatcagattgtcggaattgggaaatgtcgattgcactaaatagacttgacaaccacggatcgactcttcgaaagaaacggcaaattctccatcggcaaaatgctgaatgttcatttgacctaactcacaacccagactattacaaattttctcagcgagataccttgaattggttcccgaaaataccttgaaaggaggtgtttgactcatgatttttgtgtgtaaaacagagattattaattgtacggcaaaggtacaatttctatttcaaaattttcctgtacttttttattttttctgtatctctttggaaaaattttttaactctattttccaaaccgcagctccataccccgaaagggcgcaagcaaacggtatttcgggactcaactccttcatctctttatctcctccaatcagttctaatgcctcgtatttacccgaaactattttcatcgtttcgaatgcatgatcggggatattgatcttcacattcgcctgccggtcatcgaaattaacaacaataactaataactcatttccatatttacgaaggaatgcatattgtcgatgcggattaaagcttggattttccccattgacatacatcaaatcaaagaaatcgccacgaacaatagccgattccaaacgactgatattaagaaccgttttatacagatttcgcaattttttctgctttgccgacaatttagataccgagcaacgcccgctatcgtaccactgtctaaccgtggtcacgctccaatagtcgaatatcgtcgtacgaccatcttttccactgaatccctcggcatcctctgcacgctcacccaattcctgtccgaagtatatcatcataggccccgtattcatcatcgacgaaacgaccaatgcagggaggactttatcggcatcaccggcaaactggtcggaagcgaagcgctgttcgtcatgattttcgagaaaattcaacatttttcctcctattccatcgacagactgccaacaataagtgagctgggcagccgatacctgatgacacaatacccctctcaatttatcgtacaatcctactttatcatataggtaatcgaatttacctttctcgatataaacccgatacaacgcctgatcataaatctctgcaatgaatataaccgaggggtaattttctttcactttcgaaatagcccaattccaaaattcgacaggaaccatgtgggccatatcgcaacgaaaagcatcagcacctttcccacaccagaataggagaatatcgagcattttgtaccatgtatcgggtatagggtcgaagtgacaacggccacctcctgtataatccactccataattcagcttcaccgtttcataccagtcatattctcccgggaaagccccgaaacaatcgtttccggttgccttcgcaggatattcgaaatagcgctcctctccttcacctatgtaaaattgcggtgtaaatgcctgccgaggtatgtaataaaaattattggaaggagaaaaatgcatctccttgttgtcatgagcacccaaatcatcgacaccttctggcgcagtatcagaatggtattgacgagccacatgattcggcacgaaatcaagtactactttcaatccgacttcatgtgtacgggttaccaacgcctcgaattcttgcatacgtgtcgatggttcttcggccaaatcgggatctatatcataatagtctttgatagcataaggcgacccggcttcacccttaaccacatatctattatcctttcgaatcccatatttcgaatagtctgtcttggtagcgtgctctataacccccgtataccaaatatagttcgcacccaacttttttatctctcgtaagactttcgaggtaaaatggtttaacttaccggctccattctgcacataagcaccattagggacacatgtatcgcacatattagagaacaatcgggggagaacctgatagatgactattttctcatcggacatatcgcacgttttttatttattcaattcatttattttggaagcatgttttcctgtaaaaagtttcaatgtctgctgatagccgacattagcgatatcacgcaaagcatgaatatcaaatacggcatatcgtgcagcctctttcataggaataaaaagatcgcacaatttcatatcttcgatcacattgcttttagacatgaagctatatgaacgaaccgctatatccaatatcgattgcttatattgcttattaactaacgggctcacattgatacctataacgacatcgcactcgggacgaatggggtaaaccggcaaattacgcaagacacctccatcgacataatgcgtaccatcgataagaaccggaggaaatataatgggaatactacacgaagccgttacccgctcggcaatctctcccgatcgccatgctacatactttccatgatcaaggtcggtagccgtaacgacaaccgggatagacaaatcctcgatattgactgctcgcaacgacttttgcaagaaatgtttaaaccgatctattttaaaaaagcaggaacggggcaaagttatttcggccaaatcattgaaagacaaacctgaaaaaaggtctaagatttcatcgggtgaatagccgtcggcataaagtaccgcgataacagctcctgcgctcgtaccggatattatatccggccgaatccccaattcttccattgctttcaatgcccctacatgggcaaaacctttggctcctcccccgctcaacgtcaagcctacacgataggggcgaacttctaccggcagattctctctttctcttgccattttcattttcgtttactgtgcgaagatagcatttttcaataaagccacaatatattatgtagcaaaccatttataaataatgctttaaaaatatgtcggggaacttaaatcaaagtgtacgacgaactatcaccaatacaccgcctatcgtctcattaatgaaaagttcccccaaagcgcgcataccggcaaataaaaaaaagaaatactacccgggagtttttttcaaaacagcttctaaaaaacgaagatttgttcaccattatgctttcgtttgtattatctttgttttttgaacagaaataagaggatatgcccatgacaatcaacgacgatataaaacaggcttgcgaggtcatgcagcgggggggaatcattttatatcccaccgacacaatatggggtatcggttgcgatgctaccaatgcagaagcggtacaacgagtttataaaatcaaacagagagccgacagcaaagcccttattgtacttacggacagtgaagcgaaagtggaatattatgtttcggaagtacccgaaacggcgtggcaactactcgatgtggccgtaaagcctcttaccctcatctatcccggagcacgcaaccttgcaacgaatttgctcgccgatgacggaagcatagccatacgcatcacaaaagaaccgttctcacaacaattgtgccgacagttcagaaaagctatcgtatcaacctcggccaatatcagcgggaatgcggctccccataacttttccgaaatatcggacgaaataaaaaatgccgtcgattatatcgtaacggcacgcagagacgaaataaaagagtccctcccgtcgagtatcatcaaactcgaagccgacggaactatcaagattatacgagagtgatcaacagtaaacgacaaatacggagatacgtactggtggattaccttacatcgaatgtatcgtggttccttttcaatattgtccgtttccattttccgggaattgcagcgggcgaatcattgaaaatgtatttgctttcgcctcgtgtcatagaaggacaaatacttttcccgctgttaatgatgtgcgtctattatttgtcgggatattacaatcagccttttttcaaatctcgcattcaagaattaatacagacattaggatctgtattggtcaatacactgtttatattttttattgccctcatcaacgatgttctacgaataagaatagacaattacgaattgctacttgctttatacgctttacaatttgtctgtgtatatacagggcgggccattgtcacaggaaatgccacatctatgattcaccgccgaaaatggcaattcaacacgcttatcatcggttgtggccccaaagcaatcaagcaaatgagagaactcgaagaacccagacaatcgctcggttatcatatcgtcggattcattcgagtcaaccacgaaacgcctgccccggaagccgaaggaaggacatacccgataaaacaattatcctcgctgtgtaaacaaatgaacattcaagagcttgtcgttgccccggaagaaaacgatttagcagagcttcataaacttatcaatacactatatccactcaacttacccataaaattggggacagacgagtttaacattatctcttcgagagtaagactaaccaacatctatggggctccgctcatcgacatgagtaattgcgctatctccgagggagaaaagaatatgaaacgagtaatcgatatatttgtttcttttatcgcattgatcttactttctcctttgtttctactcttagccatactaattaaaaaagactcgaacggtcccatattttacaaacaagagcgcataggttacaggcacagaccgttcaaaatttacaaattccgaacgatgaaagcccatgcagaaaccggaatccctttgttatcggaagaaaacgacaagcgggttactaaaatagggaaagtattacggaaatacagattggacgaattaccacagttttggaatgtattgaaaggagacatgtctctcgtagggccgagacctgaacgggaatactttatccgtcaaatcgtcgaacgagctccttattacgtattattgcatcagatacgccccggaatcacatcttggggaatggtaaaatacggatatgctcgaaacgtcgatgaaatgatagctcggttgaaatacgatattctttacttggaaaatatgtctttgctggtagacctcaaaattatcatctacaccatcagaactgttattacaggaaaaggagtataaataaacatatatgattgaagacgaagatatagaaatagaagatacccaaagggaagataggcacgatttgatgatgcggctgttgatgtggagggaaaaacacatcaatgaacacaatttcgttttaattctcagttttattatcggaatttgtactgccgccgctgctctcattcttaaatttctcatacattttatacaacagttgctaacatcgcatttcaatgccgacagcgccaactatctttatctcatatacccgataataggtattttattggccggcttgtacgtacgttacattgtaaaagacgatatcagtcatggtgtcacccgcatactttatgccatatcgcaaaagaaaagccggcttaaaccacataatatgtacacatcggtcatcgcgagttctatcacaatcggattcggaggatcggtcggagcggaagctcccatcgtttataccggggctgcgatcggttcgaatataggaaggttgtttcgcctcgaccaacgattactaatgcttttggtgggttgcggagctgccgccgccattgcgggaatattcaaggcccccatcgccggaatcttgtttacactcgaagtactgatgatcgatatgactgcaacttcggttttacctttactcatctcgtcgattaccgcagtcactgtttcttatatctttaccggatacaatgccgaatttagtttcgtccaaaccgaaccgttcgtcgccgcccgcataccatacgttatttttctcggtttcttttgcggatttgtttctctttattttacccgcattatgaaccgtatggaagatatattccgccggatagggactccatggaaaaaattcattctcggttcgctcattctaagttgttctatttttctattaccgccactgtacggcgaaggttatggagccattaccagcttgctgaacgacaatctcaaacaactggccgaagggagtttattttatactgagaatggaaatatgtgggtcatgatgctcttcttgggactcatcatactcgtaaaggtattagcgaccagtgcgaccaatggcggaggtggtgtaggaggaaccttcgcacccagtttgtacgtagggtgtttcgcaggtttcttctttgcctatgttcttaatcatacaggactattacccatggagctttctgacaaaaatttcgcattgatgggtatggcaggagtcatggccgccgttatgcacgccccgctcatggctattttcttgacaacagaacttaccggtgggtatgatttattcctaccgttaatgattacctcgaccgtagcttatgcaacgataaaagtgttcgaaccacatagcatatataccatgcgtctggcaaaaaaaggagaactactcacccatcacaaggataaagccgtacttactcttttgaagatggacagtgtcatcgaaaaagattttatcgaagtacacccgaatatgagtctcggagacatggtaaaggttatttcgcaatcccatcgtaacatattcccggtaaccgacaatgacaatacattattaggcatcgtcatactcgacgacatacgcaatatcatgtttaggccagaactgtataaccgtttctatgtcagaaaattcatgaccatgcccccagccaaaatagaaatagggagcaacatggataatgtcatgaaattatttgaccaaaccaacgcatggaatctacctgtcgtagaaaacgggaaatatatcgggtttgtttccaaatcaaaaattttcaattcgtaccggcgggtactcgttcacttttctcaagattaaaaacaatggaaaaacaagatttacgcatcatctatatgggtactcccgacttcgctgtcgagagtctgaaacgccttgtcgaaggaggatacaatgtcgtggctgttattaccatgcctgacaaaccggccggcagaggccacaaaatacaatactctccggtcaaagaatacgctctgagccgaggtttaccgattctacaaccggagaaactgaaagacgagtgctttatcgaacagttgagagagttacacgccgacctgcaaattgtcgtagcttttcgcatgcttcccgaaatcgtatggaacatgccccgtctgggtactttcaatttacatgcttcgcttttacctcaatacagaggagccgctcctctcaactgggctattatcaacggcgacacagaaacaggaatcacgacattcttcctcaaacacgaaatcgatacgggcgaaatcatacagcaacgaagaatccctatacttcccgaagataatgtagggacaatacacgacaaactaatgacattgggcgccgatatggtagtcgaaactgtcgacgccattatctccgggaatatcacccctatcgatcaagcctctatccaaactaacgaacccttacggcctgcgcccaaaatatttaaggaaacatgccatatcgactggaaaaagacaagcgagcaaatccataacctcgtgaggggactgtctccctatccggccgcatggtgcgaatggatatcgccggataataatcgtttcggagtaaaaatataccgtacaacccccctaccctccaaacataactatgcaccggggtctatacacacagatggaaaaaatcatattgacatagcttgtaccgacggatttatacggatagaagagttacaactcgccggaaaaaagagaatggctgcacccgatttattacggggttttcatctcaacgacgaatttcgttgcgaataaaaagccgactacttcctacgtaccggaacggtatgcacaacatgtccgataaaagaaacaattttacggggagaaaatgatttcgccgcaacaatgagaattacggcaacaaggatcataaatataccgattcccaaccgcaacgtaaaaatctcaccaaacacagtcacaccgataatcacggcagtgagaggctccaatgcacccataacagccgtaggtgtagaaccgatagcatgaacggccatagtcatcgtcaccaaagaaataaccgtagggaccaaagctaacatgatagcaaacagccacatacgtggagtagtaagcggttgcaaataattacctccgtcgaaaaacgaatgaaagactatggctaccatacaaaacagcaagacataaaaagtcagctttatagatgaaagttttatcgatgactgattgattacgacaatataaagggcataagttaacgatgcaatcataaccaacgatacgcccaaaccatttaatccggctcctgttcctccccggtaaagcaaggctatccccgatagagcgagaataatagaaaacatagtcaccggcgatatacgctccttaaagaatagagacataatgacagctaccattataggatacacaaacaacaaagtcgaagctataccggcatccatgtggtgaaaactcgtataaaaagtcagagaagacacagcaaacaagattcctaacaaacacaatgttttcacctctttgcgagacaatctaaatgactgtttctgaataaacagaatacatgccaaaacaactgctgccaatgaaaaacgataaaacaaaaccgaattcgaatttaatccttcttgatataagaataatgcccccaacgggtttgttccataactgaccgcagaaacaattcctaatattgtacccttgactttcagattcatcttactttatttttcggggtgcaaagatagcaaatctccaaaagaaagaattatttttgtaggactttttctgcttgttataaaaccctcttagaatgcatttttttctccacgaaaagcattcacgacagtgaggaatataatcttgatgtcgagccaaaaattccaatgttcgatataccaaacgtcatattctacccgacgttccatctgccacaactcccgagtctcccctctatacccgtttacttgtgcccaaccggtaatgcccggtttaataagatgacgaagcatgtatttatctataatcttcgaataatcctgcgtatgtttcaccatgtgaggacgcggaccaacgaccgacatatcccccacaaaaacattgataaattgaggtaattcgtccaaactcgtcttccgtaaaaattctccgactcttgtttttctaggatcatgacgagaagcctgcaactgatcgctattagcattgactttcatcgtccgaaacttatagcaattaaattctttccccttaaatcctgtccgtttctgcttaaaaaatactggacccggagacgacaatttaacggcaatagcaataggagtgaaaataatgggagaacaaaccagtacaattgatgaaaacaataaatcgaacaccctcttcaagaaacgcgaaaagatattttgtaaaggttctggatgcaacgaaagaaccgggacattacccactaactgaaattcgagctgacgatgaatatatcgaccgacatcgggaaccatataaaacgagatattactggcttcggaaaacttcaataaccgagttatcttttcttcttgcctcatcggtaacgcacaataaatctcatcgactttattttctatcacgaaatcctcgacagaagaacagtccccttgaaaattcggcaaagatttctttaacgacagattatcatcgaaaaagcccataaatttatagccatatccggcatcggaacgtaactcgtctaataattttatacccatagccccggctcctacaataactactttcttgaagttatagcctttccgtcgaaaatatttcaaaagttttctcgatccgatccaccacacggccaacaagaccgatagaagcaaatagaacctcaacaatactcgcgctccaatattatcgatttgcaaaaagaatatcaataatagaaaaaccgctaagtggcacaacacggcctgtgtaacttttatcaagactctatcgacatgtaaaatacgcaattcatgtatttttgcaaaaagtgaaaataccgggaaataagaaagattaagtaacagccatattattttcacaccaaatccgccgtcgaatccgccaccccaataacaaactacggcataggcaatattcaagcaaaagaagtcgccgataacaatcagtgactttatcatatgtccataccgcccacgtgccattctctctttcttacttttttacacgactaactacataaatatttttcagagagctttacttttctcccggaaataacagggcaactccaatttattgagccgccctgtttataaaatacgttgttcttaattacaagttcttatctataagttgcactttttgttcgataagctgcatatcctctcgaattttttgcattttccgttccatctcttttaacaagccaccggatttcttcgaagatatattcaaaaatcctatattattctcataggttttcaactcgccttttttctgttcatacatgcgcaaaagtctttctctctcccgatagagtttatcgtggttcgtatcggccatttgctgtaccgtagccgagaagttacttaaccgattgcgattctcattcatattcaaacgggagaaaagagtatcgagcaaagactgatattctttatatattttatctttctctttaaaaggtacatgaccgatcgaattccactgagccatcaagtcacgaactattttgacggcttctgtactatccatagattcatctatctctttcaatttagcgataataccccgtttgttttccaagttttcttgttctacttgtcgagtggaaaccaattgttcattcttttgcgcaaagaaataatcacatgccgtaacaaaacgtttccaaatagcatcggaatgttttttagccacagggcctattgttttccattctttttgcaaagcgacaagaatatcggcagtagctttccaatcagtactgtcttttaatgcctctgctttttcacacaacgcttttttcttttcgagattctctgccattctttccttgacagctttgaagtactcggctttttttgcaaaaaattcatcgcaacttttacggaatctctcgaataactgattattcatcttccgtgaggcaaaccccaacgttttccatttaccctgtaaatcgagaacttgcttcgtagcatcgtcccattgagcaaaagaagtcaataaacttaaatccatcgactcgatttcctcacataaagcaatcttggcttcttcatttttacgttccacttctttacgcgcctcaaaaaaactttgatagcgtttatttacttctgttgaagcatctttaaacctattccacaaatcttctctcagctccttggcgacgggacctattccgcgccattcgtcatgcaataattgtaattgcttaaatgctgctacaacatcgtcatttgccaataatgcttctgctgcatcacaaagagcggtcttctgttccagatttttcttgaaatcataatcccgtaactctttatttattttcaacaagtcataaaaattctcgacgtaagactggaactttttccaaagaccagacaccgccgccgagggtaattcgcaaggctctttgaacgattgctgcaactcttgaaaacgggtatattgtctgtttatattatccgaatcttcggtaatagatttcatctcttccaaaatttgttgcttacgctccaaattttcttctctttgcttttcgagcaaggccgtatattcggcttttttctctcgaaaaacagataacaaagactttaatgtttcctcctgttcatcgggcattggcacaaattcagcccctgggttacccgcggctataaaggcgttacgagcctcttctatttcaatttttttctgtttataataagcctgtttcagttcgtcaacttcatctttgacttcttcaaccgaaccttctaccagttttctcaacgagtctataatttcttctctcgaaagccgtgaagtcgattgtaccgaattttgttcctcctcggcgggagtaatagtttgacctgcaagaagttcttctgtattcatgtcaggtttttcaagcgctgttgtcatagtataatctatttttatgaggaataaactctctattatctatacaaattaaaaaaaatattttgtcatttcatacaaaaaaatcatattattttcacagaagtatcgtctttttcatcagaaaggaaattttggtcattaggagtcgtatcttgacgaagaatctctacacaaccaaaaccaagatttactttctcccctattcccgtttcatacattatctgatggagaataggactcatcgataatttgaatttatacatatatcctataactttcgactcttcgggagtaaaccgcatcataaaaattccttttcttttcggttcggaaagcaaactccatgaaaatcctgtatcaccatcaaaaggccgaccgaaaatcttttcatattttcccagcaccgagcgataaaaacaatcggcatacccgggataatcgggcccgacatattccatgctccgattggggcgagccaccataaacacgattggagataaagccaaatactctgcttcctctccaaactcaggagccggacattcaacgatatcttcgacctctaactccacccgactacgcctatccccaagtacaaaagtttctcccgaaaaaagttgctttacaaactcgtgagttccccgaacaggcaaaaaagaaatccacatttgaaccctcttcaccaaaatatgtaatctgtcatactctacccgaatgcgggggatatataaatttgaaaacgaaaacaagcgattacggcaatcatcgatcggtgcgaaaccgttgctcgaaagccagtgtaaatatagctcgaaattttcccgaatacgacgatatacagctgccgacaattcgtattggtagcttacaggcaaaacactaccaaaactttccgatttaaccgacaacactaacttaaaacgcatagtactattctatatcttttatcaatcagagacatctgttattatttctcgttttgcatgtaccgatttgtaccataatgtagaactattttccgggacaaacaatttttccgcaatacgccgcaaatcgaaaggggtaagttttttatatttttcaacttctgtatcaatattttccgctccacccaacaattcataataagctaaattggtggctttattcagatagtgcaaattggaaaacaaatcgtttgattcaaaacgatttatcaccttatccaattccctttgctccaacagttcttccctcattcgtcgcaattccatttcaatggcttcttctccctgctccaacgaaattcccggtgatagtttccctttcagtaaaaacaaaccgggctctatatcaccggtaatagaagaatctatttctgtaaatagtttcttttccatcaccaaccgtctatacaaccgagaggatcgaccggaagccaatacatcggaaagagcatcatacccctgataatcgggatgcttacggtctaccatatgataggccttaaaaatcgcatctaagggaacctctctttccactatctttttatgaggttttgtctgaaccggctcctgaggtaaatcgcggcaagcgacttctcttcgagaaataggagcaaaccatttctcacaaagcaatatggcttcatcgaatggtaggcttcccgaaatactcaatatcgcattgttgggcgcataatgggcaaaaaagaattcttttacttcttccaatgatgcattaccaatatgcgaagtatttttcccgataacaggccaccgatatgggtgtacccgataagccatcggtcgcaatagcaagaacgaatctccatagggttggttcaaattacgttgcttgaactcttctataacgacttgtttctgtacagacaaagactcggaagaaaaagcaaggcttaacattctatccgactccaaccaaaatgccgtctcggcattatgcgtaggtactaccgtatagtaattggtcacatcgttacttgtccacgcattattctctcctcctgctttttgtagaggggtatcgaaatcgggaatattcacagacccaccaaacatgagatgctcgaacaaatgtgcaaatcctgtccgctccggcgattcgtccttcgaaccgacatcataaagcagattcaacgcagtcattttcgtagagccatcgtaatgatgaatgatgcgcaatccattaggcaatatgtgacgacgaaacgatatcactatttgaccactttcattttcaagattttgacatcggttttaggcctgtcggcagagcctgtttcgacttgttgtatcttgtctacaacctccattccgtctatcacttcaccgaaaacagtatattcaccgtctaaatgaggcgttccgccaacagtcgtataagcttcacgttgcgcctgcgtgagcgtccgctttccttccttcttaatttgttcataagtttgagcgatcaatgtatcttgcaacgcttgcagtccctgcatatcacgatttctacgcatattcatgatttcctccctatgatttgccgccaacgactgaaaaaccgattgctcttgctgcatctgcatttgacgttccagctggtcaatctgtcccggattaaaaactttccccgtgacaatataaaactgggaacccgatgaggccttatctggatttacctggtctccctgccgagccgcggccaaagcaccccgtttatgaaaatatttcggataaacgaactctgcgggaatagtatatcccgggtcacccgtacctaacatttttcctgccggagcatttttggacgtgccatcgcctccttgaatcataaactcattaatcactcgatgaaacaaagtcccgtcataatatccttcctcgaccaactttataaaattatcacggtgagcaggtgtatcatcataaagttttacttttatattccccaaagacgtttccataaggacaaccgtttccttatgacttctcgactcacaactcatactgattattatagttaataacaaaataaaataaatcttcttatccatacaattgcagttttagcaattcccattcataaaagcaatatcggctcaaaaccgaatcaagcgaataaatttactttctaacgttgatatatcatatatacaaaggtacaaaattaaataaattattaacaaaggaaaaaagaaatttaaacttgtagataaaaaaacgtcatgagaataattctcatgacgttttttatgaatagacagtaattatttcaccaataccttaactgtacttgtcccttgtggtgttgtcaaccgtaccaagtaaagcccctcagaaacagaaatctgggcactgttttcaaattctactaattccactagctgtccagaaacgccataaacctccgccaacacgttttcgccttctatcgattccagacaaatagcatggtctcggctatatacctttacggtcgaaacaactacattttcaatcccgctatactgagttgtaaacacatactcttcgacctcagactctccggattcatatattgcttttacaccagctgtatatgtaccatcatctaatgcttcgaatgtataggaattatcagttatcgcagatgcttttttctctccattcaaatatatatcataggtagcatttccaacttcgggagccggagcatcgtccgaaggaccgacataaaaattatccactttaagcatccacccgtcattagaaacataattaacagctaaataaacctcctgatccacataatctttcaaatcgactgttacttcataccaaccgctctcggtaaaagtataattatatagttcgacaaacgaagaaagatcggtctgggctcctgtggaagccaacaccttaatggtttcgggataaaccgtagccatactcggataaacatgcacgtaaaaatgagccacataccccttgttgattttctgtttcggagaaacgagccagtcgtccgacaggttgctttggactccaaaaaacatgatgtattttttcccgaaaaccgtatttaaaaatgcatcgctatcacaccggggggtcgttttttcaggattgaataccattaccggagattcgccctgttcaagtccgggaatagatatatacgtattatttatggttataccgtaaggacgcagacgatctttatcgaaagtggcccagccaccgaattgggtcgcaaaatcatcatactcttcgaaactatcgctccaacccaaatcttgattccacctaaacaagacatcggtcttcttatccgtgtcacgataagaaaaatcaacagatagattatatggagcagtaattttttccaccaacgacaaatttatctccatatccttgtctatatcgatgagcgtatctaccgccaaaaagcgatcatcgttaatactaatcatatattccccttttttcaaagaagcaaaatgagatattcccgatttgattgtatcggtcacctgataagaaccggaaagatagttcacagccactccctcggaagaacctccgttcgtagaaacttttacttttacatcggcataatccgaagtcgccggaacttctaacgtcgttgtcgctatatccgactcggaaactttataaaccgacttaacacccagcgtatgtattccagccgaaagattctcaaagataaacgagttcgttttaaccgacccgatctcttgttcatctaaataaaccgtataactttgaggggcatcactctccgctgctttgcgaacacgacgtgttttcggaagacgagcttttatagacgaaggatttaactttgccggccctacataaaaatcatcaaccatcaacatccaaccagcttgtgtaatatattgaatggcaatataaacatcttgtccttcgtacttcgaaagatcatactccatcgtaagccattgttcccatttaactgactcataattaccctgtgtcaaaggtttgaaatcactttcctctgttccggtggtcgatatccataccttgaatttttcaataggagcatccgctgctttggctttaaatcgaacgacgttatttacaccgacatgtacctgaggggttatcgcccagtcattattcgtagttccgcttgccgtacgaataaatcccatatatttctttccactataagctctcaattgaggggcataaaaccaccatgaaacgtcacctcccgtagtagagacataagcttcgtcgggagcaataatagtcgcatattgtttcaagctactattcggataacctccttgcattaacatagcagcttctgcctgatccttatcgattccggtccacggagcgaaatcgagcgtaaaagaggtataattctcgaaatcatcgaagaaataatcggtctcctcattccaaaccaacgaagcatcattaactcccgttttaggatcatgggctaaaaccgattgcaaattataaggtgtacgtaccggttcttccaacttaatctttaacacggtatcgccttttatatccaaagcagaattatcataagtctttaatccctctttttcaatcaccaaatggtgtataccggaatatatattatttattgtataagttccattctcacctagtactcggtcataaatcaatcccgattctacccgttccaaatgaaacggagtcccagccatatcctctcctgtaacagccgaaacctccaaagtcaatgtacaaggttgctgagcctcaacaataaaaaaacttaacagagctgttacaaaacacaaaatttttctcttcattttttctacaaaaagtttgggtttatagtttcaatacaattttgaaacaaattcttacaaatctttctcgaaaggcacaaagaggactcctcagtacggagtcctctttggtatacatttcccgattaaacgggctcttttatcgtttcattactcgggccgtagaaaccgaatcgccacacgatacggatacgatatacataccagaagccaaaccttccaaagacacagactcgacttcggtcaaatcttttatacaatttccggctaaatcatataccttcacatcggcttttcctcctgcccaatagacataatcggaagtaggattaggatatacagtcagattttctttcttaatttccgaaacggctaaggtaggcatatcttttatatctccaacaaatatctcatcgagagaagccccgcccgaagaaactccggcattttcagtagcgacaaaacgccaacgcatattcacactcttaccagcataatcggcgagtgaaacatatttatgacgccatttcgtgcggtcctgagtataagccaaaggagtccaatcggctgcatcgacagctcgaatctcgaaatagagagttccatcggcatcattaacttcggaaataggcccttcggtgatcgcctcattttcataccctttttcaaggcgattgcaaagagcaccaccccaagcaaaagaagcaactatatcaccggtttcagggattgcgaacacaggagaagtcaggacagaaacctcgcccgcattattatgccataccgaagcagaatattttccagcaaacggctctatctcattagatttccacatctgaatacctttgccttcatgatcgtttttccagcccataggaggaatttctccgttatttccttcaaatcccatagtataggggaaatcacgtacagactgatcttccatcgtagtaaacgaccaaaccgaagcattttcatttttacctactgcattgtaaggtacaactttccaataataggtagtagcaggttcaagctcgggaatcgtataagacaccgatgtatttccttctaatttctcattttccaacaaagaagtggggttggatttatccgttcctaccgacaattcatatccatcggcaaacaaagcgggctcccaagaaagagtcaacctgctataatcaacgttagaaacgccattcaccggattgggtgtcgtaattgccaacgggagctctccttctccatatagcttaggcaacactacattatcgaaatagatatcggtcaccaccatattatcgagaccaccgtcgcccatttcaaactcataggtccaacgtaggtatacattatcgtccactacgaaatttccatttgcgtctttaatctcgatttctttttgtacccattcattatacttactatcatcaagagaacaccacaactccgtccaatcggtatcggtatttttcttataataaagaatgaaatatgttgacggtaagaacgaatcatcgatgtattcttcaccggtagtttcgatataatcgaatttcactttaccgtttccagccgataaatccaaacggggagaaacgatatcacacgtcatcataccgcctactgtaaccgacttcacacccgatgtagccataccttccatcgtcttccagccttcattacgagaccaaccggccggtgggaaaatatcaccttcgaaactttccaaagtatatccttcttccaacataactttggttcccgacaaatcgaccgacaaagttccgccattcgtatttattttcatgaccgtgcttttggctcccgtaatcgtaggagtataattgacgcggtatgaaagctcttctcccctcttcaaagaaacggaagcgggatcgagtgtcgtagaaaaatctgtaccttcaataccctcaatgctggttatcgtcaacgtgccataacccacattacgaatagtcatcggttcggattgagccaaataaccaatataagaattggaaaactcgtaagaagtcgagccctctataaccggcaaattttcaatctcttgatttcccacttttacattgtcaacggccaatgtcgcttgtgtataattatttacaagaatagatcgaaaatagaatgcaatctttaccgtcttcccgacatacgcttcaaggctcacattaggggttaacttttgccagttattttctatccccatagcatctttattccacggccatgtcagtccagagttttcaatatcttcctgagaagctgcattccacaaatcgctccatgtatctccatcatcggtagaaactttcaccaaaaaacttccgtatttattggtcataaacgatgaagcgttacaccaaaaagtaaaagacagcgacgcattatcagcaacctgcacggcaggagtaataagccactcctccttcgaaataccggcctgtccttctttaaagtcactcatcacttcggcacaccccgaaccagcgatactgcaacccgtcacttcattccaattaaggctccaatgcgcataacccgattcaagatcttccgataattcagtaccttttacaacccaccccgaaggagggaatgtttggctctcaaaatcttcgctgagtacaagattttcagcggaaaaggtttctgcactgcctaacaacaatgcacaggcgaaaaacatacttttcatagtttccatagaattaattatcttttaataacttgggtggtattgacttgatctcccaattgcatggttacaaagtaaatacccgacgataacatcgaaacgtctacactttctacttgctcggcaaaaagcagctgtttaccagaaatatcggtaaccactactttgtcacacagttcattcaaatagagcgtggaaacgacaggattaggataaaccgtcaatcgatcaccatttacgccttcgattcccgaaccatcagtcacaacaagaataatttcttgtacagttgtctttgaaccatctgaaacagatagtttcataatcacttcttgttctgcccccggaatgccggtaatcgtaccgccgttagtacccggagtatgattcagccagaagggtttgccctgcaaggtcaccgtcaacggatctccatcgggatcggccacagaatagttataagtccatttcttccctaccgttgctgttgtctcaggaaccgtagtaaagtaaggagcactattgtcactattgacatattcaaaattttcgaaatagaaatcatcgaagaaagtcacaaaaccattcgacggagtattattacgaacagctatatagattttctgtccagcatatgcacttaaatccacatcaaactctgtccacgatgtctgactatcgttattattcttgtgaggaacttgaaccgatgtaaatccagacaatggagtaaagctagacacagcgttatctgtcgtactaaccaatactgtcaaataagcccacggatgataagtgttatctccatcatacgacttagcataaaaccggaacttggcatcatttcgagccgtcatttggtcgctgataatccagtctacggcttctgtcccatcggcagtcgccatcgtcgctaacagttggtctcccgaacgaggatagatattcctccaatcggctccttctggttccggttgttgattaatgacaatataggcataagcattcccaatattcggatagtttatcataagaggttgaactgtcgctttatgatcggcatctaccgttgtaaagcctttgggagccacagaaccaaattcatcatcttcaaaactaaaataacgagtgtacatgcccaacgcattacccgaaacaggcaacgtcacagcaggagcattgtcgaatgtaacagtcatctcgtcctctacaagggcatctgtttcaccggcagcgaacgtgatattgaaatctacgctctcacgactgtctaacactaaatccttgtgcaacgaagtagagaaattcttattcttaaatgacacatcggtgattttcattgtttgctcgccatcgttcaaaagattcaatgtctttgaggtaacggctttattataattcacatcacccgcattccaagaagtcacattaataacagcttttcctccaacgggagcttcttcaaccaaaatattatccaaagcacctcctgatccggtaaaatctactgcactataacgccaacggaaattcacattcttacctctataatcggacaaaacgattcgctgacgaacccatttttgaccttcggcctgagcggaagaaatatgggcgagttcctgccatgttccatcggattttatttcgaagtaaagcgtatctttgttaatcgtcatcgtctcttttaccgatttcgtcaatccagacggaacggcatttccccagtagaagctaacctgcatatctttatcggcaggaagcacgaacatcggtgtttgaagaatgccttgctcgttggagcccccagcagaaatataagctgcatttttaccatcgtatgcattataattagatctatcccatgctgtatatccctctttctcgctcttccaacctaacggaggaaatacgtcaccttcaaatccctcagaccacgggaatgtgttcacggtttggtcggcaagcgtcgtaaaactccacaccgaaggattttgcgtctctcccatatcgttataagcaactactttccaatagtaagtagtagcatagtccaacacaggaatcgtataagagcaaccttctacctctgtacccggcacgaccgaaaaatctgtggtagaagttccaacatataccttatagcccttagcaaactgtactccgttccatgacaatacaatatcttcgttaaatacatcggttgctccattttcaggagaaggggtagttgcagctcccggaacagaagttctaccatagaacggaggtaaaactacatcgtccaagaaagtagatgcatactcgggcacatcgtcccaaccacccgacaaatcgacatcgagtacatatttaaacatgatatagcaattatcggatgccgggcttcccaaatcgagcttcatgtgccaccattggttgatagaatcgcacgtagcaactttctcccacgtttccttgccattttttgaaaaatagacttcaaattcgctttcaggagcaggagcatcatctgccgtcggctcccaaacattcgcatagtcgaactgcaactcgtgagtacccgtcgaacaatcgagacgaggagaaaccaaagtcgggttattctctgcaaaactacaagaagccgaatagtctcccgacgtagcataagttctgcttgtggtccaacctttatcggcagtccaacctacgggcgggaacgttccactctcaaaactttccagattgtattcatcgggtaaaattatctttgttccttctaatacgatagagacgtcacctccgttcgtatggatagtcatcgtagcagatttactactcaactcagacgagggagtatatttcacataaaactcatactctacactcggtctcaacgaaacttccgagggaatcatattggttgaaaagtcggaaccttctaatccagaaattccacttaccgtcaaattgcccacgcccttattccgcaatacaaatttctccgaccatttccctactccgatgtaggttccatcgaatatataagaagtgggattaacatctgcaataggagcatcgatcgcttcgcccgtttctacgacaacattatcaacccatatactattacctttaccagcgccgctgaccaatagacaatgtacaaaagctatttttactgtcttaccggaataagcgcctaaacttatcttggaagtgtttgtaacccatccagtccagggaaaggcaaccccgctattttctaccatgctttgatcaaggaaagagaaaacagttttccaacttttaccatcgtcttccgtgatacgcacttgaaaatcatattcgtttttaaatgcagatgccgaagctcctttccacagaaaactcaaattataattcgtctcactcaaagtcagagatggagatactatccactcttctttcacaggttcaataggatcccactcaccaccgttacaataaagactcactgaaccggcacatgccgatttgctattatcgacagtccaatgattaatagccccttcttgggtgtcgttaattacagtccaacctccggtcggaaagtttgtcgtcgaccaaccttcaaatccctcattcaacagagattcggcacgcaatccaaacacaaataagaagagtacaaaaacaagcgtaattttctttgtcattgtaaataatttattaggttcattataaaatttacattacatgcaacagacagaaatgttataactattaatttatttgcagcaaatataagaatttgttattaatatctatatatttcaacaaaaatattatcgtaacactcttatttttttataaaaaacgaatgtttatacaaataataacaatttttacaaaaaaacagacaatatctattctaaataacaacaacgatacttcaagttccataacaaagcggaggctttccctcgttagggaaagcctccgctttgttatttctcaaaaaactaaattatatcgttcacataaacacgcttataaatacgcctgaaattatcactttcttgcttcaactcctctgcatgcaacttatagtcttcaccccaaatccccgacaacaaatcgacaatatatttgtgttctctatctttcgacaaagaagccgcgatgagcttgtcaataatttccctatatttctcagctcccgtagcgtgcaaatataatgcggcactcaccgtaatctgccccgtcatatctacccgtattatattatcggctaggacgggcatatcttcatcacaagagcccatatgattggcaatatattcgtaggtgagcaatccatcagtatcactattcaatatttttttcaaatcattattcatagctgacctcttttgaatgacacaaattaaataaaaactttcttcgcaacaaaatatttcacaaaaacagttcaagaaaccctaaaaaacaacttctgtaaacaaaaaaagatatttgatataggaattaatatttttttgatgtatgtttgcttatgaataatcgaatctacaaccatcatgaatgacaatctcatcattaccataggccgtcaattcggaagcggaggacgagaaataggaaaacgtttggccgatttattcggcatagcttattacgataaagaattaatcaacgaggcttcgaaatcgagcggactcagcaccgaatatttcgagaaagccgacgagcgggctccaagcgctttattaaattctttttcaataaactggctcacaggagcaggaggaatatggggcgacggaggcctatcgaacgaatacattttcaaatttcaatccgacgtcattcgtcatttagctgaaactcaatcgtgtgtcatcgtcggacgttgcgccgattatattctcagacaatacccacgatgttacaatgtatttatacacgctccccttgaagacagaatcgagagaatcatcagccgctcacaaggaatgactcgaaaagaggctatcgaactcgccgaaaagaaaaataaactaagagcttcttattacaatttttataccgataagggttggggagtagcctcttcatacgacctttctatcgattcctctatattgggcagtgaagagacagccatatttatccgcgattttatccaaaagaaagacgggctacccaaatgggagaaaaagaaataggtctcaattctctttctctttcaagtaatcggaacaaagagaataaataataccatcaacgattcctatggtaggaacccatatttctcgtgcgcctatatgcgtcgctatttgtaaataaatatcggcggcaggtacaatcacgtcggctcggtcgggtttcaatgcaaaacggtcgatacgttccacgatcgaatagctattcaattcatttctcagggtcaaaagccgctccacagtcaatggctcccgagcagacactcctgccaaatgatgcaatttattgatattaccacccgacccgataatagagatatgccgatacgtttccttcaaacgctttaaatccctatacatacggaacaattcactacggctcagttttttattcaaaatacgtacagttcctatattataagattgagattggagtaacgaacggtcactaattatacttatctcggtacttccgccaccaacatcgacatagataaaatcgccctcttgttccagctcgtccacgatatgactgtcatatacgatacgtgcttcttcaagaccattaataatttcgatatttattccacttctctccgagatataccggacaatatcggctccattcgaagaatcccgcatagccgacgtagcacaagcccgataagacaagacattataaacctgcatcagctgagaaaaagcatgcatgagacgtaataatttttctgtcttctccgtagaaatacgaccttttgtaaaggtatcttgtcccaatcgcagcggtacacgcacaataaaaactttcgataaatccgatacactctctcccggataaatacctttgataagcaatctcactgcattcgagccaatatctatggccgcaaaattaagtctgtccataaagtttctcattctataagcgaagataatcatttccccaataaaacatctcgattaaaaataaagtctcattcaaaaacatataatttataatcgctccaaaaatgaactttcattcaatatcacttgtttttaccttgaaaaccatagtagaagaacaaatttgcgcaataaatgaagtgattggttatacttgggcaattgcgcagtttccccaaagcgggaaacaggagactccttcctatttttattttcaaaaattcaatcaatagcttcggaaggagtctctttttcaaagaatatcatcatgccaaaatagagccgcataccgggtgtacctttacgaaaaattaccagctctatgaaatcgagaattacatttaacggcatgaaccgttattccccaccgaactcggcacagccgggagactgcacagctattgtcaacttacgaaatcaatcaaactgcctcaaacctgtcgggacaccggaatatctatacactccggaaaagaaaaaccatcggctcgtctatgttcatatctgctacgacggagagcatcatataacggaaaatgaaaataccttgtattatgaggctctgataaaaaaagaaaacggaaatatccaaaaagaatcaagccagttgttcgagctaaacgacctacaagttctgtctattcaatccataggaaacacactcataatcatctgtaccgaaagtatatactatttactttataaagagggaaaatatatctttttgggtgaaaagcccgacatacctgaaatttcatttttcccttatgtagaatataccgatgcctacttcgtaagcgaatatacctttcaacatggatacagcaatccgacccgactcgacaccgaagacatcaattattacaacgatgcttactacaatgcattctttcagctacaagaaaaagcatggaaacggcactatttcatacaacccatactcatacgttatgccctcactttatatgatgggagccgaattttttcatcggctccggtcatggtctctttgccacaccccatacaaccctatcaaatgagcatacgattgaaaaattcaaacaatctttgcttaggttctcatgaaggacaaatcatcgccgggaattatagcctgaaatattatattcatcaattcaatctcgacaactggaaagatatcgtaagaagtatagacttttttgtctctcccgaagccacgatcttcgaacccgatcaaaaacaacaaggccttaaatttacgatcgaacgtacagaagaaaacgaaacgatctcttttctactgaaaggagacatctcttttctcgacctgaaagagataaagaaacgctacttacaagattctctattttataaaatagcgaccatagaggattggagcgactggaaggaaggtgaatcgtacaccatagaaaataaaatacggccagatttactcatacacgaggaggttctttcgccagataatacgacactgctttctacgggagcacatgtcagctatatacacaacaaaagactacacatagccaacttaaagaaaaaactttttcccggatttcccctcagtctgttcaacgtgggaaacaaaaatgccgagactgtcagtgcttatatctgcacttatctcaaaaccgaaagaggagaatgcaaagtcgtttggcacgggaaatcgaactatttcttcaatcaactttcacctttgatttcttaccccgacagtaacgcctataaaatggaaatcgtcgtaaaaagcgagaaaacccgatacaaagggagctttctactgacagcctccgaatatgaaaatagggccgattatcttgacgagacactctctgcaatcacattggaaaacgattctctgccggcctctaccccactcgatatacccttgtccgaaaatgacacttacacacagcctaatatactgcgggtttcggaactcgaaaacccgtttgtattcccgtccgaacaaacttataccatctcgaacggagagattacaggcatagcgaccattacagcagctttatcggaaggacagttcggtgaatttcccttatatgtatttacagaagaaggaatatgggctttgcaaaacggaaacggaatcgtatgttacggagcacaacatcaactgaatcgagaacccatactgccggaaaaccctatcgtccctctcgaagacatgattatgtttactacggcaaaaggattatttatcatacgaggctccgaaatacaacagctcttatcgttcgacgaaaccgcctgcgaaaacaatagcccaatcactcaccacgacatagactctacattaattcctgcaaccaccgatcaaacgactttatctcaatttattcaaggaagtatcatcgcctacaatacaatcgaaaaagaattgatatgttgcaggcccgatctcaaatatagtctcattatccatattccttctctctacatgtatcgcataagccgacagtactcttccctattctatgatgccagtcatctactcgcccaagacgcagagggaaaagtttacgatttacaaaaagaatcagcagagataaccccaatcgcactcgtatcccgcccaattactctccaaagtgaagagtaccaaaaatggagagaagttttctggcggctctcaatgtcagaaggaaagctcttgctttccctttggggaggcaatgatgccgaaggcaacttttccaaaatctgtgaaatatcgagcgcatcaaaagtagcaggacaattacccatgcgttttacaggaccggcatataaatatttcaggcttattctttgcgggaacgtctcctctgatttccatctttcatctgtcgatatccactccgaaaacatcatcagcaatcggttacactaatataaaaagagtaggacttattgtataagtcctaccctactattctcatcttaccgcaatctacggtttatagtttttcaatcctttcaaagttgctggatcggtagcctcctcgatactcatagcaaagcctccacccggagcacaaggctgaacgatacgagtcttgttcgtcacaatatatttacgaatcgtataagcctgcgggttatccttataatgggcatcgggagcatcggcatatatagttgcaatatactttttcccaggctccaagaaatctaaggagaaacgagccgtatgcccattctcatcgaccgtggaacctacataccaattattaccccctttttcccggcgtgccaccgtaatataatctcccggctctgcctccaaataacggctgtcgtcccaatcgacaggcacatctttaataaactgaaaagcatcgaggaaacgattataattttcgggtaaatcggctgccatctgtaaaggactatacatggtcacgtataaagccagttgccgagccagagtagaacgaacatagctgtggttatcgggattaagtttagaaatatccgtctcgaaaataccgggagtataatccatcggacctccgataagccgtgtaaatggcaaaatagtggtatggtcgggattattgcccccgaacgattcatactcggttcctctcgccgactcgttaccgataagattgggataagtacggctcaaacccgtaggacgaacagcttcatgggcattcaccataatcttatgcttggcggcttcggtcaatgcatagagataatgattaaccatccattgtccgtaatgatgttccccacgaggtataatatctcccacatatccactcttcacggcatcatagccatgatcgttcataaactgatatgctttctccatgtgccgttcataattacgaaccgaacccgaggtctcatgatgcataatcattttcacccccttcgatttggcataccgctctatttcttctacatcgaaatcgggatacggtgtgataaaatcgaatacatagtctttcgacttacctatccaatcttcccaccctatgttccaaccttccaccagcacagcgtcaaatccatgttctgcggcaaaatcgatatattcttttacatgctcggtattagcggcatgacgtccattaggcgtcaaacgagaataatcgaccaaatcgagtttcacatgaggcaaatcggtataagcccaagtacttttcccggttatcatttcccaccatacacctatatatttcgtcggttttatccaactcgtatcttcatagacacacggttcattcagattaagagtcattttggatgcaagaatatcacgcgcatcgtcactaacaataatcgtgcgccatggagatttcgccggagtttgcatatatcccttatcccccaatgcatcgggtgtaaggtgagactcgaatatcatatttttgtcgtccaaatcgagcgacatacaagaataatcgaccaatgcagcttcatgcaaattaatatacaaaccatcgtcggttttcatcattaaagccgtttgcacccccgtaggagagaatggagtttgagaagaattcggtgtaatagcctcgttcatcaatccacggatttcggacaatttcgacgtcacagtggaatactcctgtgtatcataatcgcccgggagccaaaaagctgtatggtctcccgccatagcaaactgcgtcttctcttctttaatcacaaaataatccaaattgggctgatcgggaaattcatatcggaatcctaccccatcgtcaaatacccggaaacgaataatcatacgacgatcggtcgacggttgttccaatgttacttccaattcattataatgattcctaatctcttttacctctccccaaacgggtttccatgtctcatcgaaagtcgatgtctcagaaccagccaaacgaaatccatcggttaaattttttcccgacttcaactctaatcccaatttactctctttaataaccggccgacctttataatctactttataaacagggactccattatccaattcaaaatctaatacaatgttcccgtcaggagatttcaaagtctcggctctcaaaatgccataagacaacaaagccataagaataaaaatcagtcgtttcatttattcaatacatttatttgggttttataaaactacggagaagcatctcaactgcaaagataggagtttaagctccgactcaaaaatttctctatccctcctttaattaagaaaaacgaataattgaagaaacagtttaaacaaacgacctgtttaacttaaaatataaattccttttatttcaataacgataatctcaccgagattccataattgctgttcgtaataggatatgatgaagaggatactaacggtgtattaatctgatggtcgaaataagcccctaccgtaatacgtttactcaatacataattggctgttactttcaacatcgtagtacgagtaccactggttgcctgcgtaaaattctgttcgatacggcgaatgagagcctgattcttgcggaatgaaaaatcggcattgattgtcaaatcgttgctaacacctgtttgagaccctttcaatttcaaaatcgtattaaaattagcgatcttatacccggccccgattgtaaaatcggttgtcgacgcctctacgatttgtccggctgccgaattcaatgtcaacgtgcgggaatctttatactctatattgcctgtaacattatttttcagtgtcacctttaacccgataaggggagcgaacctctcggttatcattaccgatgatatatcgaatggagaagagggtatgggattgcccgtaagttcatcgcgaacgaaaccgaaatccccgtctgattccacccaattaaggaacgaagtaaatgatcccacagcataggtacactggtaagcatgcgatagagtaaacgctttaaagtgtttctttataaacggtatttgcatgaaaccatcgtaagtaattcgccagttcggcaatatagccgacaatcccgggaacggagacaaatcgattttacgggcatcacggccagaatatgcagcaataaatgcaggtatcattacatcggcagaactacgattcacaccgccgttagccgaatcatagggcttatctccaaagccggtagaggcaataaaacctttattcggataattgcccaacgatccgtaatgcgcttctaaccgagccgctattatttcccgatttttcaaaaaatcatcgaatgcttgcgacgaatatccgtcttttgcagaactactcctaaatgcagtcttcaatgcaatatgtgtcttggtatagcttccgcctcgtacagtcggcatatcgtcaaacataaattgcatttgagaactacgcgtgtctgttctatttcctgtcaagtttattttcaagccccggataggttcaagcgctatttcgaaattaaactcttcggtacgaccgataaccgccggacttatctgcgtggaatcacataaaagccaaccacgttcttttgcccgatatacatagctctcatcagtaaaaccaaaagcgaaatcgaggccgggagccataggaccatacgaagtcgattgcccgaatacatcgcctacattcggggaaaacagaggtaacgaagtagtattggtcttacgataacgcacgctcgcatttcttaccatcatcaatccccgtaaagaatattcggctgcttctttccagaaattacgttcattcttattcgaaggagtaattatcacattcaagcgttgggttcctttatcgagaatcactacattattggcatcgagaactttcgtcctcagagccactttctttccggcatcgtccctcgccacaacttttaccttcttattgttgagattatgccttaaagtaaccgtagtatcttcccgaagcaaaatggtacgttcgaattttctatttttcttcgctgccgcagctctattattggaagaaaaacgtttgtttatcttctgcaaatatttcgacttattgtataattgttcaaaattgaaacgcccgtcaaagctcaactgcccttgattattcaccgagttacctaaatctatttcctctgaaatctgggctcccctatcccaagtgtatgtagcgttatacttggcattaaacgacaaataatcaagaacaggtatcttgctgaacggagccgtatacgatgcattgaaagtttgattataattccacggtgttcccaaattcttgatgctggtcaacacggtatctttccatgcttcgtattcatctgggaaaagctgtttattcaccacaccgaccggctcctcgatatgagcgttcgtcatcgtttgcaacgaaaggtttatcgacttggtgagattccatgtcaacgagaactgccgatcccataaaaaacttttacttacactcgtcggcaatgccattcctcccgatccactcacatcgcgaatctgctgttcataataatatcgcgacatattggtattaaacgcaatattattaggcaaataattaaattcccattccttcaaaaatttcaaatgcttagatttactctttaatcccttcaacgggacaaaaggtttaacaaaaggagtataggaataagtgaaactaccccgataatcgtatgtattctcaaattcggtagtagggtcttgtttcgattgtcgattataagaatagctgatagaaaaattagccgggtcatagggcataggattcttactcctaatatcaaaagaaactcccgacaaactgaaactctcgacagtcgatttctctatcgaagcatcacttatagagtcacgctcggctttactgcccgcattgtccaaagcatctttcaacaagatatcttgatcgagcggattgtatttaggagaagtacgttgttcggtaatcgaataaaataatggggctttcaatttgactttttctggcaaaaaacgccctaactcaaccatcgtagctatattatactgatagtaatcgtctaatcgacgttccgtaaggctttggtctatccccccaaaaccgacagtttctacatgccccgcgatattcagcgtagcaatatccgacaaaccgagatttacatttgctttggcagcccaaccaccagattggtcaaaatcggtcaaacgcatttcattcacccaaacgactatatccttagctgcattcgaattatttctcacaccgatcatcatcgtacgaacatcgctcaaagaagggttccccacgatagtcaccttattttgatttttatcgggatcataactggaataacgggtttgaaacgtcacagtcgaattatccatacgtttctttgcattccgttccagcttcaaatcggtaaacaaagaaagagggaaatcaaacatattggattgtggccaaaccgcttcctgatcttgtgcattatacgtgctataattacccggctccgtcaatgacaacgggacctcatactcataataattcgatttactatcggatcctaatcgtaaaaacacagacacatcgccatctcgtaaattagttttatcgtcaatcagtttctctgcatgtacaaacatctgtaaccgcttgtatgtacgcatatccataccactgttcttataaaccgcacgagcatctcccgactgcaaatcggttactttcaaagacatggcttgttcattaagctgagttatttgcgattgccccgggtctatgatacgggttacacccggaggtaaaacataattaacaggaacctgtcctgcattctcctcaatatttaccaccgatatatccatcttaccctgagccggagcatctcctttcaaattcaaagcatagttatacgttcgccattcaccccgaaccaattccaacgtggcaaaacgcaaatgtgtctcacactcaaaacccgtcataaacatgcggataaaacgtatcgttttaaaatcttgaatagatcccactttcttctgaggacgagacaaaggaattttgaattgataccacacagcttttccttcttcaccattgcggagccggacggttgtctcccgcttatcggtaatacagtttttccccacctccaagctatcggggcataacgatatgcggtactgataatacctttcatattcgttcaacgtattatcctgattgatatcctccacatcaggaacgcttttggaagactgataatacgaatcgttcatttcctcgggagaccgggaattgttttctgttccgttatatcgtttataccgatccaatatagaagtttgggcatcgtcataatcgtgtccacgataaaaatggtaattatccccggccggatcgttaaacggagaaaactgatcttgtcgcatagcctccactaccgccggagatagtttagtttcgagcttgtccaaataatctctatatgatgggaacccatattcctcgtcattcgacagaccgtctaaacctacgtcttgcaaagcccgtgcaccactggtattatcgaatgcataagtcaaagactgacgtttggatacctttccccacaccgtagtcgctatctgtgttgtatcaccgtcgaccggcaaaccgttctcgaaagacttcataccgtctttgagaatatcttccgacacttctcccaaattgaaatacaattctcccccgttatgattagtctgattctcatctaaaaacggatccataagccagaactgtatatattcgatattcgatgattcgaaatcggtataatccatttttcgcataatcccgccccaacggttctccggattcaacaaaagcccttgtgagtcgatattatcggcatcgagattgtacggtccccgttcctgtggataaaatgaaaggttcaatgtctgtaaggtcgtcgattctccataattgatttccttattgggaaatatctcccgtacactcacctcacgcacataaggattagacaattggtccaaatcatttttcaggtgagccggtatcaatgtcgagtttttctgagtaaacattctatcgatataataccacgatagcaatgctctattttgcccataacgaatatcattggaataacgagcttcgggaaacaaagcatcagatgaagggtcgtacggagtggaagccaacgtccacgaataaggagacttcaagtccaaccctgtttgtgtcgattcgaaatcatcgatatacgatgttccctgcgagctgccgtttttggatttatgcggtatcaattgggcaaattcagccgtgagagccaacgtagaaggagctgttgcgtttacagtcggaattttattcaacaaattggtcaaccataaaaaattcgtattataagacaaattcactccccacaaagtattattcagtacctcatcacccatatttactttttctgtcagggacttttcagacaaatgcataatcgtcgctcctacattaaaatctttggagaacgcataattcaaatcgagtcccagcattgtcttacgttgcatattgaacatcgattgattttcaagcgatacactaatcggagtacccgcctcgattatactttggttcaatatcgtcacgacacccatcgcataatccacaatataatcggaattttcgaccaaagtcatacctccggcagtaacgaccaccgatccccgaggtacattcatcgcatttaatcttatctctgcgcccgaagatgctttatattctccggtcataataaatttattcttctccgatacttgctgggcgatagtcaatgtcgaatcatacagctcttgataaacatacttttccgctatcgccgcatttcctattttttcggccaagtgactaccgaacggctctatgaccggaaatataattctcccgttcgaagattgaatcgtatacccctctatgtagtcaaaaataccatcggaatattccgactcattcgcatccaaacggtcgaggttcattacttgcaacaaagtctgattggatatattcccctccggtatattatttacagctacccccgtagaatcattctgatatttaatgtacagcctgaatttatccttctgaacctgataggcccccagcgaataaacatttttcatcattaaatcccaaatgggtaatgaggtcgatatggtagaacccttcaacattttcagaaaaagacattgatccgtatcggtaacatctcccgaaaattccccaacctgataaacctgtccgttataagtatattcataagcgacagcaatcatctcatcggcattcagtttacttttcaaggagatataacccaattgggaattcaaggtatattcagaagaagtaagtttccgggcactctctattttcacataatcctgccccccctcgataccataaacagaaagaggttccaaagcctgtgtcaccaaattgatattacgagcatcgggataaccgtttttaatctcagcatacaacgagttggagttattcatcggattttgctgcgcggtagccgatatccaatggtcgttaccgatatgaacattttcggccaaatccataaaaccgacaatattcctcgactcttcataattgccttgtttattcgtaatccaaacttctattcgattgatactcacacccgatgagacataaggcaatttggaagcaaatttatcgtaattgtccctaaaaaaatgagctaaaaaaaagtgcctgttttcgtcataagcatctgcccggatttcgaacggcgtggtctgtgccccaccactcgcattgaccgttttcgattcggactgttgttgagaaataagagcggtagccgtcagtttaccgaactgcatagtcgtctttacaccgaataaagccgtactaccacgtatcaacgacgaccccgtggtcatactcacattaccggcttcgatattcttaataatctcgtcttcttttccctgatattgtaatttgagatttttcgagtcgaaatcgaaagtcgcatcggtgttatagttcatattgaacgacatcttgtcaccgactttcgccgttaccgaagcctgtatcttctcgtcgaagtcgaaataagtcttctttctggaactcatcggcagtgcgggattatcgagtttgttatgtttcaatcccatattcaactcgatagatccttgtgtcttcaattgtacgccacccggtccaaaaactttttccaatggcccgagagagaactgcatatccaaaaaattaaactccgatttgctgttctctgcaaaattctgtgcattccgttcccgataatactgctgcatggatttacacaacgtataatcgttatactcggccgccgacaacatgaaaggagtacaaacatcaaccccggcaactcgggtatggattacataacaattcgtttcggcatcatactctacttctgttttcagattggaaggatttttcaaatccatcggagctatttgcccgatttcatcgtacgattcgggtgatgttttagtgacaggataacggacttgtatggaatcggattctttattgctttgcgttgccgatatactgctcgatgaactttgcggatcggccgactgcaaagcagcaaaagcggaataggctcctaatccgctcactgctagcacaactattgttccaatccttatccgtcttctcattcgatactcctacacaaattcccgcctttactcaaaaggcgacgacgccggtatcagagcattttcagagcctgcttaattacctcttcaactctcatcgaaggagtatcacgcaataacttttgaactgttttttgcgattggggctgtgaaaatccaagcatcaccaacgcagccacagcttcctcgtaaatttccgaggctgcgggcgtacttattactaacggattgtcggtaggttttattttatctttcaagtcaacaattacacgctgtgcagttttagcgcctattccttttaccgacttcaataaatttagattctccgacacaatcgcctgctccaactcagaaggattcaatgaagacaatatcatgcgggccgtattgggtcctactcccgaaacagaaatcaacaatatgaacagttcacgttcgtgacggtcataaaagccataaagttgataggcatcttcccgaatcgcttcgtaaacatacagacgtgtagcttgccctttcgaaaggcaagaataagtatttaacgaaatattaagcaaataacctattcccatgcactccacaaccgccgtggcgggagttaaatcggtaacctctcccgtaatatattctatcatatcgttctctttttattcattttgttcaaactgcaaagatagcgaaaggcgagtgcagagacaaacggaaatcacatttccgttttgactatgccgagccgcatcctatcttcgtatttacaaagatagtgaaaggcgagcgcagaggcaaacggaattttcggctcgatatagttaatatattatatatataattttttatccatattttttcctacttttgattcctaataaaatatacgtctcggcattaaaaccgagcaacttatttgtaccgctatcaacctttattacatttgtatctaatgaataaaatttagtgtcgaaactgttcatcacttatgtaacaatagatttatcactatacaacaatgaaaaaagtatttctcattttcctttctttgatttttattttcacgtttcaagtaaaagctattacattggaagatattacttccgggaaatttcagtccaaagatatagcagaggtttatccatcagccgatggcgttcattatttcacagcgacaaacgggaatacacgtatcgtaaaatgtgaataccggacgggacacgaagtcgataccctctttgacgtaaaaactgccagagaatgcaatttggaacaattcgacggtttttctctcagccccgatgaaaaacatctattaatttatgccgactcggaacctatttaccgacgctcattcaaagccacttattacacgttcgagatacgcaggaacttattgaaaccgctttccgacggaggaaaacaacaagctgccgtatactctcctaacggccgaatggtcgcttttgtaagagataacaacatctttatcaaaaaactcgattacggtacagaagtagccgtcacccgcgacggagagcgaaacaaaatcatcaatgggattcccgattgggtttacgaagaagaattcgctcttacttctaccctgcaatggtcgccggacgatgctacattagcttttgtgagattcgatgaaagccatgttcccgaatattctttctctctctacgaaggttactgtcccacatacccggaatacaccctatatccgggaagattcacttacaaatatccggtagcaggcgagaccaattcacaagtatcggtactctcttataccgtcgaaacacgagccttaaaaacgataaaactgcctatatcatcagacagttacatacctcgaatcaaatttacgaccgatccgaacagactcgcggtagtcacgctaaaccgcacacaaaacgaaatggatatatactctgtcaatcctaaatcgggaatcagcaaactgctattgagagaaacagacaaagcttggatcgaagaatctatattagacaatatctcgttctatcccgatttcttcgtgattgccagcagtcgtagcggttatcaacaccttttccgatacaattacaatggaacattggctaaacaaatcaccaaaggcgaatggaacgtttcggcatttttgggttatgatgaaaaaagtcgctcttatttttacgaatcgaatcaagaaggtcctctttacaaagccatttacaaaataaatgaaaaagggatagaaaccaaattatcggaacgaatcgggacaaatcaggcttcgttcaatccctcgtgtacttattttatcaacaaatacagcaacagcaatgaacctttgctcgtaaccgtatgcgatgccaaagggaaagtaatacgcacactggaagacaatgctacgctaaaagcacgaatcgcccaaaccgatttgccacgcaaagaattttttacctgccccaatcacgcaggcgatcaaatgaacggttatattttgaaacccacgaatttcgacccctcgaaacgctatccggtagtcatgtcgcaatacagtggcccgggttcccaatcggttctggataaatggacaatagactgggaatactacttagtcagcaaagggtttatcgtcgcctgcgtcgatgggagaggaaccggcggacgcagtcgggcatacgaaacctctgtatatatgcaattagggaaactcgaaaccgaagaccaagtagcgggagcggaatacatgcggaccctaccctatgtagacgacaaacacataggtatatatggttggagttacggtgggtacgaaactcttatggccatgtccacaagcaacggtacttatcaagccggagtggctatcgctccggtaaccgactggcgttattacgatacgatttacgccgagcgctttatgcgtacgccgaatgaaaacaacgagggatatgaacaatccgcccccattactcatgccgaaaaattaaaaggagatttgttgattatatcggggacagcagacgataatgtccactatcttaacacgttacaatattccgctgctttaatcgaagcaggaatacaattcgatactcaaatatataccaataaagatcaccatatacgaggttgcaatacccgtcatcatctgtattccaaagtatgtaactttttcctcgataaactgaaataaaaggaatagcatcccaaccctatggaaaagaaaaaaagtaacaaaataagttggtctaccatctattctttgggattggtacctgctattctcgtatggggattggctccatcgcttaaagaaaatgtcattgtcctgacatcgattatcgtcggtattatatggattatattctcccggctttacctacatttttttaaaggatgtggaataattgggtggataacagggtggtctatgatatttggaggaataacaaaagcattcttgctccttttcggatattataatatccctatcgtacttttttgggctccctgcatggcggtcatattatatctgttcgaacatcggaatatacaccccccattctgttatcagtgtatcttgaaacgaggaggaattcgagaacgacatttactgggagatttcagccgctatgaaactcattatatcgtacgcttaatcctaataggctctatattagtaactatgttatcatggatacttttcgcttttggcgtggaaaggcaaagccgtgccgggaattatttttacttctattttcctttggggttaagtatagctatcattatcttcgaaattattcgccgtctgttgatccaacaacttatcgaaagtcacgagaaaaaatgtaaacgttatatcaacgacaaaacgaacaatcccgatatggattactttttcacggtaattcgtatcatggtcataggccaagaaaaaatctacttaatcgaaaacaaaggagatgaaatagaattcaatagcggcaaagggttcgatattcctatacatcgttatacagactattgtacgacgcaagaagaagaggaacaaaaagcccggcaaatcatacgcgaagaacttcaaatagaaaaacccgatttacgccacatatcatcggctatcgccgaagattcttggcgaagagtcggacattatgtattatttatctcagacgaggatcaaaataaattaaacaggtacaacggccgttggtacaccatagaagaaataacaagattattccatagcaacaggctttatcctctatttaaagaaatctatgcccgtttctatacgattgtcaatacggcccgtacctattacagcaatggaaaaaggagatatccgataagaggatataagccgtcctttacattacacagaatcgatttgctggatatcgaattagatgacccggtttggctttacgtaagccggcacaatgacgaccgccttttataccgtatagacaaatggattcgaaaaattttaggtaaaaaatgttcctcatcaaattgctgcgatgcttgatttaatcaccatattgggtcccaccgcttccggtaaaacatctttggcggtggcgctggccgcccacctcgacaccgaaattatcagtgcggattcccgtcagatatatcgctcaatggatatcggtacaggtaaagacttatccgaatacacctatgaaggacacgctattccctatcatctaatcgatatttgcccacccggatataaatataatctatttgaatatattcgggattacaacaccgcttacgcagatattatcaatcggggcaaaacgcccattctttgcgggggtacaggtctgtacatagaagccgtactcaaaggatactcgttacctcccgtacccgaaaacaaggccctgcgcgaaaaacttgctgaaaaatcgctatccgaattggaagagatactcaaaaactacaagactctacacaaccaaacagataccgatacttgtaagcgagcgatccgcgccattgaaatagccgaatattattctcggcaagagcccgaaaaacttattcctaatccggtaaaaaacgctttgattatcggagtgaacatagatagggaaagccgacgcgccaaaatttcgcaacgtctgcgcgatcgtctcggacaaggcatggtggccgaagttcaaggtttgctcgacagcggcatcgatccagaatctctcatttactacgggctcgaatacaagtatattaccgagtacctcatcgggcgcacctcatacgatcaaatggtttcattgctcgaaatagcgattcaccaatttgccaaacggcaaatgacatggttccggggtatggagcgtcggggattctccattttttggctcgatgcagccctctctctcgatgaaaaaatagctaggatagatgagaagataacccagtcggtataatgcgataccccatgtgttccataaatattaagagctcttttcgagaatacaaaataagaagctgttttaaatttattccgagacagattgagacctatgttgaagcagattggagtccgagatacgcagtcaatagcgggctattgacaaaaatcaagggattctagatgcgagacaggggctcaatatggccggaacatacctgcttgaaatgataatattatttctctataaatttaaaacagcttctaaatttctacttgcatatatcaaaaaattttacgaatattgtaagcaagaaatttcacgaaagggaggctgtgtagggattaaccttacttcattttatttaaattgaatgttcatcacacagtttgcctcatgagtagtatggaagcaaaagtcgaaattctttggaatagcctattgttaacatggtcgtatgattacagagtcgccggaatccatacgttcgataaagatggtttagcgatcggagagaatttgatcgaacgcctgaatctcgaaacatcgtggggaaccttaacaattctggaaactaccgatacttccataacttttatacataatggcacgaggataatattggccgatggagcaaaatatcatttcgaagttccacaagtgctccccggcagtcaaggagatttttacatcgaattgatttgctcccaagtacgactcactcactgggacgaatttttcgaatgctctcggcaattcacggtcgataaaatcgactgggatctcatgcaagatggcgatgtagactctgctttactcattgccgaatctatcgccgaacaatcgccggaatcactcgaaatcatcgcagaatatatggccgttgctgataatctgggtagtacagaggctcatgaatggttacgcgactattacagtcctggcgatattgcagaaccttacagttaaccaaaaatgaaacattatgatagatttctccaaagaacacaagaccttacttagccgattggcgaagagcccgaacgacatggaagcccgtgccgacctactgcgttgtaactgcctttgggccgaagaaaatataaagggaaacaaaaacacatggcaaaatgcgaatctgatacgtgaagtattacaatatgggcctcttttactcgaaacgggagaaatgagcatgtatgacctcgtttacaaaacatgcgacagaataaaaagaactatattttcacatcctcgcctatctgtaaaaattctcgaattggaaagggaagccctttatcgtatcgaagcagaaaccggtcacgaactgggtatcaccgaagacgttcaacatgaaattagtctattaggaacaaatatatggtatgccgaccgtggtgaatatgataaaatcaaaaacgagggacatttgaaacacgacccggtagaatggactgcccgttgggaagaggttatcgacgaagcagaagcaaaagcatatgccagattacaagaacaccctcagggtatggggttttgtcatgcctattggccgacgttatctgctattttggccgaagactacgatatccagtggcgtagcccgtcccaaatgaaccccaaagttctgttcgactaacagagtattagcctaaaaaacagagggatacatcgttaacatgtatccctctgttttttctattctattttaaaatcctttcttatttacaaatcgaacttatagcctaacgaaagcatgaacattgtattattaggactaccctcctcatcgtagacattagaaagtccgaaattataacgggcatcgatcgtcataccaaaatcaaactcatacccgacacccaaagcaagagaaaaatcgaatgttttagccttatagccatatccatatggttccaaatctttggacgaaatctcttttcccgccaacttcgctttatattcatcatcgacacagaagccaaattgaggaccaaaatgaacatttaaacctgcccacggataaattttcaacaaaacaggtatattcagatagtgtgaagtatagttcgattccaaagttttcgtgagaaccggtatatcatcaaaaccagccccctgcatcgaataataaaattcgggctgaatcgccaataatttattaatacgataattagcaaagatccccacattcattcctgctctgaaattcgatccatctccagtcaaagaagagacgttaagacctaatttcggacccatagaaagttgagcgaaagctccacccatgcacatcacggtagcgactaccaataaaatctttctcatttctttttagttttgttacacctagttctccaaaggggtattttaatacaatttctgcggggagaacttcagtaatttttttcaaaatatttactgatcgcatgttaataaagcgcgaatatagccattaaagctatatataaaaactatttatattctttttcttccacatcacaaaaatacaccccacaacacattatctatcaaccacataagacatcaacataataatataaaatacgaatatttatataatcatgccataaaaataaaaataccaactattttctttgtagcgaacttaaaaacaaaaatctatggcaaataattcgtacaaaaatccgtcgatgaaacaactcgatattttaaaaaccgaaaacgaaatagagcgctctcactacccgatactgttacaggctcaaaaagcatgggagaatatagaacatttcaggcaaaagcgaaaacgaaacagggactatacttatggaaaacaatggaacgacttgataaaactaccagacggcagagtcgtaagcgaagaacagtatatacgagaacaaggaaaagttcctctgaaaaacaacctgatccgccaaatggtcaaagccgttttagggcaattcagaaacaaccaaacccaacccgtatgtatagctcgcgacaggcaggaacagagtttgggggaactgatgagcacagccgtccaatacgcctaccagcataatcggttacaagaactcgatagccgcacattggaagagtttttgatttcgggtatttgtttccagaaaataggatatggacaccgtagaggaaaaaccgacgtctgggtagatgaaataaatccgaaccgaatattcttcaacgctatggaggacagccgccattgggattgtactctcataggcgaactacacgacatgtctatcgccgaagtaatatcgagattttctttcgggtcaagggctcgtgccatacaattacgtaacatctactcagaggccgacaatgaaacgatacggcacaacttcgagaacctcacggcaaaagcaatcgaccgactcgatttttttatgccggccaatcaagatatgtgccgagtcatagaaatatggaaactcgaaagtcgggaagtactgaactgccacgatttccgttccggtgaatattaccacatacctgtgacggaagccgaggatataaacaaagaaaataggaaaagagtgcacgaagctcgcacatcgggacaaccggaagagactgcacagcttatcgaaacagaatggagtataatgcaaacatggcggtatcgcttcttctccccactgggagacttattggacgaaggagaaactccctactggcatggagaacacccttacgtgtttaaactataccctctcatagacggtgaagtacatgccttcgtcgaagatgtaatcgaccagcagagatatatcaaccggctgattaccatgatagattttatcatgggttcgagcgcaaaaggcgtattgctattcccggaagatcaaattcccgatggcatgacaatcgaagatattgccgacgagtggaccaaatataacggtatcattttattccgtcccagaccgggctctcccatgccccagcaaatagcggtcaacgccacacaagtgggagcttatgaaatgctttcgttgcaaatgcgcttgttcgaagacatatccggcgtccacggtgctatacagggcaaagcagcccaatccggtactccggcctctctatatgcccaacaaatacaatattcttcgaccaatctgctcgatctattcgagtcgttcaaaacattccgagaagaccgggatataaaaatcatgaaaacaatccagcaattctactcggataaccgttatttaaacttagcaggaaacaattacggaaaagaaatctctacctataccccagaggaagttcgtaatacagaattcgatttatcaattgccgaaacactatcgacacccgctttaagaatggcatccaacgaatttcttatggagctgtttcgttccgggaaaatatcgctcgaaatgcttctgcaaaacggagcctttcctttcgccgacaaactgctgcaagctatccatcaaagtcaagccgaatcgacacaacaaaacaccacaccgcaaatttagacgatcggtttatcttaatcgaaacaaagacagaatccgcttgggattctgtctttgaactctaaccataaatataaatcaaaacagacactacttctgtaacacatattctttcatatgagctatatcgtctaaataatcttgtaagtcttgttcatgatcttcttcctctgccaaaatatgtttggcgatatcgcaagtcgtaaaatccttcccgtcggtcaatgcagcgatcgtctgataacgtaatatagcgcaacgttctgctgcgacattctgtttcagcaacttgactacatctacatcagtaggaggagtataagcacattttgccaaatcgaaccatttcttaggatccaatacgggaacaccctccaactcgataatacggtcggctatcaatttagcatgttcgaactcttccatagcatgttcctgaaattctcgttgtacatcgccacgcatagcgcctttcactacaagggctcccacccaatattgataaaacgccaaccattcttccgacaaagcggcattcaactcatcgagaacttccgatacatctattcttcccttcaaaatagctacactttcttttgccataattatatctcttttagattaaaaactttccttaataacaattgcgatatctcgttggttcaccacgacacctacaattctacttccatattcacaagaaccgatattctcacctttatacttgggatcattgagatagaggagattcgaataaaaatgaaattagtcgctttatctttttctcatctttcgctatatttgtagaatataggatacggttcggcagagtcaaatcggaaatgaaatttccgtttgcctttgcacttgcctttcgctatatttgtagagtttttctttaattataaaatttctgcaatgaaaaacatacgcacagccattattggagccggctaccggggacggtacttaataacccttttgcaaaaaataaatctattcgatattatcgctgtcagcgatatatctcccaacctatcagaaattatatcgcaactattcgcgggagaaaagattcctaaaatttacaattctgggactgacgattatcgacgaatgctaaatgaaaacacgatagacctcgtcatcatagcttccccgtggcatctccacaaagaacaaaccatcgaggcattaaaatctggatgccacgtcgcaatagaagtgaaaggagcattggatatagacgagtaccccgatattatccatgaaagccgacagaataaaaagcaggtctttcctcttgaaaacacactattcagaaacgatattctggctataaacaacatgatacatgccgggatattcggtcgcttggtctttcttcaaggaggataccgacatgacctcacccatatactcatagatcaaaccggaaacttcggtgtacagaatgggtctgaatcagagtggagatcgaaatattacgaaaccgaaaacggcgatttatatccgacccacggattagcccccttgtgcatgttccttgatatcaatcatacagactatataaaaagcatcacgtctttctccacaaaaccgggattaggactccacgcttgtatggccaagcgaaacggaatgaaatataccgatatacaccaacacacattccgaatgggcgatgtcgtcacttcgatactccaaaccgattccggggctcaaataaacttattgcacgataccactctcccacgtccccgttctctcaactacgaagttcaaggaaccaacggaatttggaatgccgagaaaaatgccatttacatcgatgggttaagtcctttcgaggaatgggaacccgaagataaatacatcaagcaatacaaacatcggttctggcagcaatgggaatcggaagctcttcgctatgacgggcatcatcaaggcatggactacatcatgctaagggtcttgggtgaagctctgcaaggccgggaaaattatccggcaacgttggaagatatggcaacttgggcagcagtatcgccctactcgaaaatatccattcaaaagggaacttcgataccctttccccacttctaaaccatctcgaacagacatagaaaagagtcgctccggattttcggagcgactcttttctatactctataaatcaatctttactacaaaaggctccaagcgaccgtcaatcccgccatcacaatagcgaccatgctcattagtttaatcaatatgttcaaactcggaccagacgtgtctttgaacgggtcgcccaccgtatctccaacaaccgtcgctttatgtacttcactgtgctttcctccgaaattaccctcttcgacatacttcttggcattatcccaagcccctccggcattcgccataaagatagccaaaacaaatcctgcgctaagaccaccgataagtaacccgacaacacccgatacaccgaatatcaatcccgtagcaataggagcgacaatcgccaataacgaagggaataccatttcccgttgcgctccctgagtagaaatggctacacaacgttcataatcaggttcagattctccggtaagaataccttttatctccctgaactggcgacgcacctcttccaccatgtgtgcagcagcgcgtcccacagcattcatcgtcaatccgcagaaaagaaatgccatcatcgaaccgatgaacatacccgacaaaactttcggattcatcagcgtaatatcataataccgcataaaatcggtaaatgtcgcctcactaatcaagaccgatgtaccatcggcaaattcgagcaccgtctctccgatacgagtcaacccgatacgaatctcttccatataagaagccagcaaagcgagaccggtaagtgcagcagaaccgatagcaaatccctttccggtagccgccgttgtatttcccaaagaatcgagggcatcggttctttttcgcacctcctcgcccaaaccgctcatctcagcatttcctcccgcattatcggcaataggaccataagcatcggttgccaacgtgattcccaatgtcgaaagcattcccaccgcagcaatacctataccatataaaccgagagtgacattcgataaatcgaacccggatgcaaacaaataggaaaggataataccagcgacaacagcaatcacaggaacggcagttgaaatcatacccaacccgatacccgaaattatgactgttgcagggcccgttttcccgctctccgacaaacgctgtgtcggacgataggattgagaggtataatattccgtactgcgacctataacaatccccactaacaatcccacgattaccgaaccgccgataaatgcccagttttctaactgtaaagcccataaaattccaaaagtagcgaatacgataagtacagaactgaggtttgtaccgaaggagagagatttcaacaaatctttcatctttgcatcttcccgtgtacgaaccgaaaatatcccgataatagaaagcaatatacccactgccgcaatcaacataggagcgattacggctttcatctgcatgtcggtttcgccggctcccataaaggccgcagctcccaaagccgatgtcgctaatatcgaaccgcaatacgattcatacaagtcggcccccataccggccacgtctcctacattgtcacccacattatcggctatcgttgctgggttgcgagggtcatcttctggaatccccgcttcgaccttaccgacaagatcggctcccacatcggcagcttttgtataaatacctcctcccacacgggcaaacaaagcctgtgtagatgctcccattccgaaggtaagcatcgtagtcgttattacacaaagtttatgggctggattcatagcttctgccggaatcactgcattcaacagaagataccaaaacgatatatcgagaagacctaaccctacaacgacaagtcccataacagccccgctgcggaaagcgattcgcagtccacgatttaatgaagtacgggcagcattagccgttcgagcagatgcgtaagtggctgtcttcattcccaaataccccgataagccggagaaaaaaccgcccgtgagaaacgccaccggaacccatttgttctggactccaaaaccgaacgccatgatagaaaacaatatcaccagaactaaaaacaccaaacccacgaccttgtattgctgacgtaagtaagacatagctcctctgcgaacataaagagctatttttttcatttgaggcgttccctcgtccgttttcatcaactgcttataaaaataccaagcaaagagtaatgctaataccgaagaaataggcacaagccagaataatgcatttgtcatagcaattatataattaagttaacatttttagactggttaaaggtaagttggtttgcataaactgccaaatctttttctctaatttttgttttttagtcctcaaaaaacagtatcgatcggtatgaaaccctcctttttacattcaaacattttgggaatatttcttggaagttacaattaaaaaaaatatatttgttcttgtttcctttttatctttaccatattacttatgaaaaatagttccaaattcaattcattaggaggttttcccgatctcgaatctttcaaagacgaatctgggaaatatgggtatcgagagaaaaaaactcaaaagatatttatcgccccgcaattcgatgcagcatattcttttcacgaaggaatagcggcagtgaaagttgatcataaatatggatacatcgaccgacacggattaatagtcatcaaactcgactacgactgggccagttcctttcataatggattagccatggtagaacgaaacaaccgatatggatatatcaatcaagaaggcaaagaaatcgttcctattatttatgaacacatcgacgattttcacgaagggctggctccggtaaaactaaatgataaatggggttatgtagattgttcggggaaagttgtcattccccctcgatacgacgattcttggtgtttcaacgagtcattggcagctgtcagagtcgatgagaaatggggctttatagataaaactggacatttactcatacctttgcaatatgattatgcttggaatttcaaagaagatgtcgcagcggtaaagcaaaatgggaaatggggttttatagataaagcggggcaagaatttctaccgttcctatatgacgaagctgattctttctcaaaaggattcgccgaagtcaaaatggatacgctttggggagttatcgacaaaacaggtacatgggtaaaaaacgaggattgcatctgacctctctactattctaaaataacttgatctgaatattttacaggcatccgattttcatcggatgcctttttattttcccctcccgtatgtttttcgatcctgccacaatttccccctctttctcatagatatttgcagtagatacaatcgaacgaactaaaaacttactaaaatgctaaacttatttttaacggcacttcccctgttagggaactatttgttttcacaaaagaataaaaaacagtctcaacaaaccattcaaacaaatcaaaaacgctatgaacaaaaactatcacaactagatagtctcttcaataggaactattacagtaacattctcgatcgatccgacgtgagggggttacttggtaatctacgcgaacagatgtcggaaacaacccgaaatctaaaaaataaggcaaccattaccggagctacacccgagaccgtcgtcactgtccaaaaatctcaaaaccaagcatacggcaatgccgtcagccaaatagcaagtcaagcggcgacatggaaagaaaatacgcttcaaaattatttgtcggcccgtagtgctttggaagatttttaccgtccgttgaaatcggattatatgaacaatatactcggtaaaacatttccctccttcaatcctctacaaaatctgttcaacccaaatacacaattttaagatcatggatacaatttttacaacagaaaattcgcaaccgactaaaacattagcagactatataaatgaagggaaaagttttttggaagcctatcaagctcaatcaccaaaaagacttgccagaggcaaagcatacgaacaggtagaaatgctgaaagagctgttaaacttgttacatcagccggataatacagaggtacagcaggttacagatgttttaattccgaaaacatatcctgaaaaagaaaagaggttccttaactatctctcatggttaacgtttatctctgaccgtaacaaaccgaaacacccttgccctcctttgagcgaaaaaattttattgcaagcctttcgtatgggacgtaatgagttcgagcgcaaacatcacatattcaatctattggtatccatcggataccctttacaacaagccggcctgcttgctaaatatttagataataatattcattaaaaaatttccaataaaaatatgagcaccttaaaccccgatttactacaagaaggtaatggtatatatggttgggatttaatcaatccctatctacaagaatggtatcgaaaaaaagaaaatggagagaacgaagaatcacccgctttcatagctccgttaccgggagaaaattcggttgtaccattcccctctattcctaaacaagaaacaccaatacccctaaaacccgactacccgataaaccccgaaccggaaatcccgatcgaaacacctcgcaaattaaagtctttaaccgaaggaataaatctagcgggcgaacgtatttggaacgatctaaaatattcccgaggatacatacaagacaaactatctgatagtgaaatgtccgaagccgcccaaaaagcattggagcgacttcccgaatatcaaagaagcaccgagtcccaactacaaaataaggaagactctttacaaaatgaaaccgaacacagtacctccgatcgtcctcgtcttgaattaaaaggactcgaagaatatcgtcgattaaggaatgagaatatttctccaaacgaaataagcagacagctctccgagacagcccgatggggaaacgaagggaaaaaactcatggaagaagctcgcatggcgaataactcttttcccgaaaccgaaggctgggcaactattggtgaaatcatagctaatatagggagagtggggataccggttgccgccggagccgccttcgctccggcaggtatcgctgctggtattgctaatgttgcctcttccgttgccgaaagccacgcacaagcacaaatggaactggataatttcgaacaagaaacaggacaacgtttaaccgacggacaacgtaccggattcgtagctatttgtatgggagccgatctcctgtttgacacaatcttacaaagccgataccttaaaaatctaaaatcgggagccaaaaagaaagcatcggaatatttcaaaaagacgattcttaaaaatcaaacagcacagactgaaataagtaaaataatgagtaaactgtcaaagaccgataaatcggctcttatagcaggaacctttaacgatgcagtaacaggagggaccgccgaagctctcaattcggtcgctcacgatatggctaaaacgatttacaacgaaccgggacaatatccgactctcgaatcgatcctacaaaacgctactaccggtatggtatcgggtagtttgggcggagctgccgttgggggtacgggacgagccatcaatctgaaaaagagaaatatgcggagaaacaagcaaaccaccacagcccttgtagaccaacatggatttgcatgggaagtcctcgactacaacccggaaaacaaaatcgccgaagtactttcgcccaatggaaaaaatacaataaatgtacccgatatcgagcccgacatgattcatttcttctccgtaggagaatataaaaataccggcaaaataaaaagagagataaacgaacccgatccgttcgccccaattataccggaccagaccaaagataaagtatggcaaaaaatgtctacacgtggaaaatacagactaaccaaagatttagccgaacgtatggggctcgataacgttattgtttatgaacatgagtccgacctaccggtctccgtccgatctctaaaaaaacaaggaggtaaaataggcggatattatatgcacaacggtaatataggtatcgttctcgacaatattccttcctacacgagattgcagagagtcctattgcacgaagcgatagggcatcaaggccttgatgctcttttcggcgactcttatttcaaagacgaatttttaatgaaagtctatcggtctatgccctccgaatggaaattgagaggcaattcgtggaatgctcgaaaaaccgatgccgaagagtatttggccgatttggcgagtaacggcgtatcgtcttccgcatggaatcaaatctatggggaattgagaaatatgctccgaatattcattccgggactaaacttctcggaaagagaaatacgtaacattctcatacgttccaaaaatgcattaaaaaaggacgattcaatttccgagatgaacaaaaaaatccgacaacggcatttaaacgaatcggacgacttagggacaccactaaccgaatccgacccggaaacataccgtttcttgtgggaaaacgacccagaatggaaaaactacaaaaaattctatgaccacgtatatggagaaaggaccgacataaacgattaaaaatcgcccccggctgtttctgtcgatcaacagtcgggagcagttctatctaaatcaaattaccaaacttatccataacaaatctcaccattctcatttcgatattcatcgaaactcttattatattgagtcatcgcccgcaaactcatacccatactcgaaaatcctccgtcgtgatacaagttttgcatagtcactttacgagttaaatcggaaaacattacgatacaataatcggcacactcgtcggcattggcattaccgagaggagacatacgattcgcaaaatccatcaacgattccattcctttcaccccgctaccggcagtcgtcatggtaggagactgagatatagtattgattcgaacatttttctccctaccataaatatatccaaaactacgggcgatagactctaacaaagccttcgcatccgccatgtcgttatagccgaataaggttcgctgagccgcgacataagacaaagccaaaatagagccgtactcgttaatggcatccatctttttagccacctgtatcattttatgaaacgaaacagccgaaatatccaatgtcttggataacatatcgtagtccaaatcatcataaggacgcttttttcttacattcggagacattccgatagaatgcaacacaaaatctatcttaccccccaagacctccatagagcgcttgaaaacattttcaagatcctccacgctggttgcatctgccggaataatctcagcatttaatttttcacctaatgtatttacctcccccatacgcactgccataggcgtattggaaagagtgatcgttgcaccttcctccacagctttttcagctactttccatgcaatggacatttcattaagggctccgaaaataatacctctttttccctttaataagttataactcataatttatacttttaagcacaatattgcacagtttgtgcaatattgtgccgttttgtggctgcaaatatagatacttttttttaaccgcaaaacaaaaagttcgattttgttatctcgacattacaattcaacaccctataatctccaacttacaaattgacaaaaccaaacgaccaatgactcgctcaaacgacatcgaccatcaaaaaggatatttcatttattaaaaacttttagaataaaaaaagcagcccccatcgaaaatttatccgtatatttgactttatcaaatataggtctcgatttggacaagacaaaataaaaaaacttgttgttcattttgtcccaccaatcatctttcgctatatttgtatcgtgaaattaactaaaataataattttatacacacaaaaccatgagtaagccatatgttgtaggtattgatataggtggtaccaatacagtattcggaattgttgatgcccgcggttctatcttagccacaggttctatcaagactcagaaatataccgaaataacagattacgtaaatgcactgcacgaagaactatctcgtcttttggcgcaagaaaacgtaaccgatcaaattgccggtataggtataggagctcctaacgggaactattttaacggaacaatcgaatttgcacctaacctcccgtggaaaggcgtaatccccttagcccaaatggtacgggaaaaattcaatattccggtaactatcaccaacgacgctaatgccgctgctatcggtgaaatgacctatggagctgcccgcggtgtaaaagatttcatcatgattaccctcggtacgggtgtaggtagcggtatcgtcattaacggacaaatggtctatgggcacgatggatttgccggagaactcgggcacgtaatcgtacgccgtggaaatggccgcctctgcggttgcggcagaacgggttgtctcgaagcctatacctccgccacaggtgttgcacgtacggctcgggaattcctcgaacttcgcaacgacgaatccactttacggcagcttcctattcaagagatcacttcgaaagacgtttacgatgcggccgtgtcaggcgacaaactatctcaagagattttcgagtataccggtacaatcttaggagaagcattcgccgatttcatcgcattttcaagccccaagatgattgtcctgttcggaggattagcaaagtcgggcgaactgatcatgcgtcctatccgcgaagctatggaaaaaaatctgcttgctatttacaaaggaaaagtaaaactggtactttcggaattgaaagagagtgatgccgccgtattgggagccagtgctctgggctgggaagccagctaatcggcattagatatattaaaagaaaagggctgcaatgcagcccttttcttttaatacaaacttatttatttctcctgcaaagccttgtgcatagcagccgcagcacgccgaccgtctcccatagcaagaataaccgtagcaccacctctcacaatatctcctcctgcataaatatcaggtattgaagactgcaatgtgtcggcattgacgacaatcgtccctttcagagttacttcaaggccctctatggaattagggaccaacggattaggagaaactcccacactgacaatcacctcgtcgatatcgatggtctcgatagctcccggaataggaacaggagaacgccgaccagaagcatccggctctcccaactccattttttgaagtcgcatttgacaaactcttccccgttcgtcccctatatactcgacaggattatgcaatgtcaaaaattccacaccctcctgcttggcatgatgtatttcttctttacgagctggcatctcgtcctctgagcgacgatagattatcataaccttttccgctcccagccgacgagccgtccgaactgaatccatcgccgtattaccacctccgataaccgccactctacgacctctccacaccggtgtatcggaatccggattagcggcatccatcaaattcactcgtgtcagatattcattactcgacatcaccccattcaaattctcgcccgggatattcatgaatctcggcaagccggctccgctggcaaccatgatacccttaaatcccatctcatgaaggtcgtcatacgagagcgtcttcccgacaatgcaatcggtcataaactcgactcccatacgacgaaggttctctatttcaacgtcgacaacctcgttgggcaatctgaactcgggtataccgtattttagaacacctcctatctcatgcaaagcctcgaacactgtgactctatatccccatttagccatatctcccgcaaaagaaagtccacaagggcccgaaccgactacggctattttcactccgttacatggcttcatggcagggagagcgacctctcccgaagcgtgttcataatcggcagcaaaacgctccaaataaccgatagcgatcggttcttttttcaatttttgagtataaaagcatttcgattcacattgacgttcctgtggacatactcgcccacacaccgcaggcaaagcactcgtttctttcaacgtacgagccgccgacaaaaaatcaccccgttctatatttttaataaattttggtatattgatcccaaccggacaaccagtcatacaaagaggctctacgcaatcgaggcaacgagtagcctccaaaacggcttgttcacgtgtaagcccacaattcacctcttcccgattagttatgcggtaagcaggatcgagctctttcattttcacccgaggtatatcggtacgctccttagcctttctacttctacgcagctcttctctccatttttcggcacgttgtgccgataattcttctttattcataaatataacaaaacttgttacttcgattccaaatctttataggaagacaatcgcataagcatttcgtcaaaatccacttgatgggcatcaaactccggcccgtctatacatacgaaacgagtttttccgcccaccgtaatccgacatgctccacacataccggttccatctaccataatcgtattcagagatgcaaccgtgggtatatcgtactttcgagtcaatagagaaacaaacttcatcatcaccgccggccctatggtcacacacaggtctaccttctcccgattgatgacagcctctacaccttgtgttacaagacccttattaccatacgaaccatcatcggtcataattattacttcatctgaatattcccgcatctgtttttcaagaataatcagctctttcgtgcgagcggccaacaccgtaatcacccgattaccagcttccttcatcgccgcaacaatcggcaataagggagcacaaccgacaccaccgccacaacaaactaccgtaccgaatttttcgatatgagtcgccctgcccaacggacctactacatctgtaatataatccccgggattaagagcacacaatttcgaagaagactttcctaccgcctgtacgaccaaagtgattgtcccggccttgacatcggcagcagcaatcgtaagcggaatacgctcgcccttctcaccgactctcacgataacaaaatgacctgctttacgagccttcgcaatcagaggggcttctacgacaaactttacaactttttccgaaaaatattctttcgctacaatcttattcatcgatttctatattatctctctttcttacaaaattataaatttccttcccgaaaaataccccggacaaggactatttacgttcatctgtcttttattaatcatgccaaaccgcatcccattttcacatctcatgcaaagatgctaaattttaatgaaactccgataccttacataaaatttatccctgcttatacatctataacaatccaccccaattactttaaaaagggatgaattacatttaaaaatcaaataccaataacaatttaataaaaaaaggctgaacttcaataagttcagcccctactacatctactgtaccatttcaaaacacgattacacagctacctgcctcattcgctactacacttatagttccttgtgtttcactccacttacaggaaacaccttcactactttcataaattgcaaagtctttaccaacaaaacgttccggcaaagcaatctgtctattagccgcttttttaaaatctatgtaaacagcctctttgtctctgatatatccgcaataacaaagcaaatcttcatcgtctgccacaggagagacaaaccatgtataagcccctttccaatagtccgtatcgcccttcgaacgcgatttgctgcctatgactttatgataactctttccataagaattaccgataaatactacgtccgaagcatcaacctctcctcttgttcccaaaccttcattaaacatgtgtgccgactgataagcggtcgaacttttctctataaatcggtgaaagttaggataattggtctttgtaaacctatcgacctgtgcctgtggaatccaacctatatattcaccttctggcgtaaaagtacattcttcgtctttaaacatcgattgcatgccataataacgatttacagtaacactacttttattcatataggtatgagtcacctctacatttatagtatttcggcagatattataactgctaaactccttacacaaggtatcggaaaaaagatatttcccatcttcttgataggcgctagccggattgtaaatataactccacacatacactctcacatcggtagcattcaacacagcatctccggtcaactctttatcgttacatttaataatgactttatctgtaaaagccgttcgggtcgtattatcatctgcataagaatgattacccccacaccaaccaccagccatcaattcaaacggaccaatgttatcactagttgcctcattcaataaggtcatacttgcaacatcttgagagtgagcgaccggcttactcgaactattcgcaacaactcccaccttcgaaaaagtgtacaacttattgaacatacatttctcaaatacatatacgatatcgttactttcatcaagtttcgacgatacataaagagcatctccaatccgttccaccacacagctcttttgcaaatcgataggcggatcataactctcggccgaatcacaacttggacacattaaagcaatccataatgttccacataaacttttcatcaacttattcataattttactttttatgtcgttctacaatcaattcacacaactcgtccatgatttccttatctctttcatcttcggatttatacatttcataaatggctctacttccactataatatgcaatcggaagatcaaaaaagactccattgtccttgaaaacatcgatatacgatttcattcgagaacgaaaagaaaccggctcataatcagataacgcacgagaatcgaactccatctcgatagccattccgttcttttcactttctttacaagcctcttccaatctcgaatctggaatattttcttcaaaaaaatggttgggttgaagataggccatatcgaaaccaagctctctccatttatcataacccactgctttccaataaggaatccaataaaacaatagattcttcgaatgtatatattcgctcaccgacaaggataaatcaccgttataagcaatatcctcgtccacccaatagaaaccggcaagatccaaattcttataattggcattacggaaagactccaaaaccctatcgacgtaccaccgtgtggcggctacttggtcttcccgatacaaaaagcacaatgttttaccattcagttcaccccaatctctctgtctaaacatggcagctggtaacccgataacaacccgatgacgaaattcgggctcgcctatctcttttttcacagtctcaatacaagcatcgagagcagataacgattttccctcctcgaataatctttgtaacaaccactcccattcttgcttccttgcatccttaccgtaaccttgcgcataacgccggcctttcccatcgctaaactccaaaaagagaaatccgtcaaaaagccattcttttcggccatcttgaaattgatgcattacatacggacgaaactgctcctccgtccagtccattcgatttattccgccctgataaatcaacgccaaatcctttatggtattttttctaaatgctcgttccagacaatcgcctatacactcggcataacgaaattgtcccaaatcggtaaaatggattccatcgaccgtcgcctcataatcatcgcctatcaaagcctgagacgggacgtaatatatatttttctccttttctttttgcagctccttgtagaccaattgcaaagcttcattcttttcacgtatctcatcggccaacacccgattataaacagcactcggaaactgagggtcttccacgaatatgataggcgtcgtccgatgtttttttctcaaaatacgataaaagggaattgtcagctcttttatttgagagaccgacgcattcggcacaaaatccaatacgtatgccgaagcctccacctcgctcatcaattcggcgatctccttatctaaaaaagcatttgcactaaaccctaaatttacgacttctctgtcaaaacggcgaccgataatattagtagctgccattcccggacgtgatgcactggctccttgaagaatgctcgtcccatacatcacaatgggattctctcgatcgggactgttcaactccgacgcaacaatctccgcccccgggtcgatacctatttcgagcttatcgataccgtcataaagcggcaaatagagcataaattctctttcttggggtaacatgttcttaacgatcgtcacatggttttctttcccggtaggaatagcactattcacgaactgccacttcccgtcttgcagacaatacaagtccaaccctttgactgccgtcgctgtaatgtgattgaactgattattatatttaactgtccatctagctcccacactcgtagaattagttctaaaacgaacatacaatccggccgtattctggctcaaattccacaaagctttacgcactgtcggctgcatatcggaagaaagccgagagtacaatggattcttacaatctcttaattttccatatacaggaagaaagcctgttacatcatgaaacgaccgctgtgaacgaagtaattcttgcaaccgttcaggctcgtcagtcgtaatataatcgacacccctatcgatacaccactgcatatcttccaaagaattgaccgtccatacatttaccttcaatcctaaatcatgacattcctttatccacccgatgtgctctctaaacacattgatatgatagtcctgtcccgccgcatcgataaactttaaatctttcggtagccgagaaccgttcaaataatacaccggtgtacctttgggggcttgctcgataagttccaacaaaccctcggccgaaaatgtaatatattctacccgtttttcgagacctttttttctgaccatctccacaattcgtttcacggcttcggcctctctctgtttatctttatgaggcttcaattcacaaatcaaacgcacactcaactttttagccctattcaaaaacgcatcaagcgtaggaacagtctctccattcttcaatttttgcttcaacaacattttcgacgaagacgactctatatccataccgtttataacagcatcatgatttacaatcaatacgtcatctttcgtcagccaaacatcgaattccgatccgtacacacctatcgaatcggccagttcaagtgcccgtaaagaattttgagccgaagaaggtgtcttccaatatccccgatgggctatcaccttaggaagctcggccatactgttcgagcaaaataccccgaacaacaatatccacaaaaaagactttatcttcatctcccattattaattatctaatctatcgtcatcgtctggacagggacaacaggattaagtacacgattaacaccccatctttgttgttttttcacttttatatcccgaaccgaccttatatcttcacatgaagccccgaaacttactttgtacagacccttctccaatacccacgacgaagagggttcatcgaaatgagccaaatcataatctgtaaaattcattgtaagtatctcactttctcccggtttcagcaattttgttttcccgaaagctttcaactcacgaagaggattttccgaagctctattttctgcccccacataaacctgaacagactcatgaccttctgccgctcctacattcgtaacctttattttagccacccacctgcccttctctttttttacagagggttcgctatacaaaaattcggtataagataaaccatacccgaaaggataagaaaccgctttatccgcagttgtaaaatatcggtagcctacccataccccctcttcgtaagaggtataatcaaaattttccccgcttagagtttctcccacagtcggatagtttttagaagaaggaatatccgaatatcttacagggaatgtcatcggaagtttccccgacggattcacagttcctgtcaatacatctgccacagcatgcccacactcctgtcccggaaaccaaacagaaagaatcgcgtcgggtttattcttccacgaagctgtttccaccacacctccgatattaagtaatacaacgacctttttatttcgagcatgaaactcctcgcagaccttgtcgatcatataaatttccgaatcggaaagattaaaatcatcatgcacttttctatccgactcctcggtcgaacctcttcctatcacgacaacagccatatcattcgatttagcttgctccccaaccagtgtcttattgggcatcaaatccatttctggataaacataccgacgatacgaaagacgttcccaatcggttgccttcgggtcgaccaacaacgcttcttggtaagcattatacttggtataaagatctttcaaagaacgatccaagacaaaacctacctgttcgaggcctgtcgaaatatcgacaatatgagatttatttacattagaagagccccctccaccggcaatcgagtgataagcggttgcaccaaaaagagaaatattttttatccctttcaacggcaatacgcaactgccgtttttcaaaagtaccataccctgtccggcaaccgaacgggataatgtagcatgctgttccaaatcaggcaatgcggcatgaatgtcctttcgaaaagcattggtctttaccacatagtcgaggacatgtttcacggcatcatcgataacctccatcgaaagagctccgctctttattccggcctctatttcttcaagttgagctttttctccgggcatcaacaaattagtaccaccctctaattgctctggactattccttttcccgtaccaatccgatacgaccaaaccgtcatacccccactcttcccgaagaacagttcgtaataattcggcattcgattgagtcaatattccaccgatcttattataggacgacatcaccgtccacgggttcgagtgctgcaaacagatttcaaaccctttcaggtaaatttcacgcaaagccttaaccgggatacgagaatcgttattcagtttattcacctgttgattgttggcgacaaaatgcttcaaacttgtaccgataccccgactctgtactccattcaccatagcggctcccattagcccagataaaacgggatcttctgaaaaatactcgaaattacgcccgcacaacggatttctcataatattgattccgggtgtcaatatgacatcgacatcataaacagcagcctcttcgcccattgctccggcttgtgtctccacaagctgagtatcccatgtagaagccagcaaagtcgaagacgggaaacaagtacaataatgacgttttccatcgaccttaataggaaaaatacgtactcccaccggaccgtcggccatgacagtcgaaggtatgccgtattgcggaaaggactttgtatacccagccgcacccggcacataaactgttaatgaatcttttgaaaccaacgactcgcatccgaccaataacattgctttttcacgaggcgacatttgtctgacaatctcatctatattatcctctgccaaacgcaaacttcctcccgcacttcctaaggagcaaaacaaaaagcctaaaacaatccaaactctatctacacacttcatacacaaaaactattcgttattttactatcaatttcagagacttcacatttttatcttggataacattcaagatatacatacctctatcccattcggaagtatcaaagctcacacttttttctcctgcatttaccgcaatacgacttaccaatacgccatcactccgacacacagacaacaaagcgtcggaaacctcctgcaaatctaccgaaattgccgtaccctgctctaccggattgggataaatcatcaatgcttgcgagttatcgaccgaagaaattccgctttccccaatcaccgtcacagacaatgaggtagtcaaatttccataaccagcagtcaacatgtgagtaccgctacccgaagcattcaatgtcgttccatcattcgttattgtacccaaactcgaaccacacgacaaagtaacaccctctacatttctatcgaccaatactccatactgattataaccataaataaccggagtatatgcatctccctgattcaaagtcttggcgtaatccataaagcggatagtcgttatcgtcacatcattctgaggagcatcggtagacaaatataatccatcggtcaccgaacgttccgaaccgtcactaggttggttaatgactccctcgccttttacatagaatgtcgacgaaccacccccatcgaaattcatagcctcggaacagcccgcataaatcataatatcggctaaaacttttgaaataggtcccaccgatatagagcttcggccatcggctacgagcatcaccagcttattcttttcagcattataccctacggcagtacgaggttgagccgaagtcaaatgatcgagtgcattttccgtatcgagaaccttacctcccgaaacaagcatagggcaaccacctaatgcctgttgtattttacctccggtaaatccgttaaaacgaatcgcacaacgaacttcgaccacatcgccctcacttaaattacttacaaaagattctttcgtaccactacccgaaagaatataaccatcatcaggaataggcatagaacccgcatggctcgggttcccctgaactctcattctcacagttgcacccggtgtcaaaaaatttccttcaccatcgggaatcaaaacgacctccgaaccattactatcggttcctgtatttgctccttttctcgaagaatacaaaaccaaaccattcgttcctcgttccaaattcatagcactaagctccgccgtactataatcgggagctgtaagttttacataaaaatcgcctcctcccgagtaaggaattttgttggcatcgattccgaacaaggaccaaccactggcttggtcactacaatatacttcaccgtcgactacggtgattccgcacggcatagaactcgaaaaaaagtcggcgttgataccggcaaaataagaacgattgctcgtactgtgcgattccgctgcattcgataccgtaccaagccccgtgagcgtgtccttatgtttgatagcccgcacatcgacattttcatttttcaaatcggtcgttgtataaaatacacgcaaattgacaggaccagccaattttatcgaagtctgagtcgtacccggaccgatataggcatgatacaatgtatctactcgatactcttttccatgtaatatccacgtgccggatgcaaaaccagccatgacatataatagtgcaaggacacaggaaatcagccttttcatcgttttttatttattggtttatgaaacggaattaaaaaggagacgcttcatgaagtgtctcctttttgacttatcgattgttaaattaacgaacaatcactttggagacttttccatctacctttacaagatagatacccgcattacatttgacattcatttcatctttgctaatcaatataccacccacgttgtaaacttccacgctattggcattaccgattacattgatctctccgtggttggcaactaccttagccgtggtagtctctacaccttctactgacgaagaagctaaatcgaatatatatttcgaaataaacgcattattggctcctgcggccgggaaataatgataaatctcggcttgtgtatcggaaacaggtactgcggcaaaccactgtccgaacgccggattggccaaaatattcgttccttgacttttcatttcggccactttctcttcgtcgctcaaacgtaaaacagcaaagcccgactcataagcaacctctgtcgaataataacgctggctatataccagataatcttcatctcctatcgtaaagaaacagcttccaaccatatcggtaggaaaacatatcatactttccgtttcttctttcaaaggaacaatcgtataatctttcactttggtagcatttccgtcttctccgatatgcattcttttcacaccacacttacgttcatgaataatgatatcaccatcatattcataagcaatagtctgagtagaagctgtaccctttaacgttccgtcattgctattctcaaaagcgaccgacacatcgactgcattcatattgtccacatcttgtgcaccattcttgatcggcagaatataaacatacggactattcgcacacaacaaatagaatgtacctccttcttcgctcaatacgttacccgaagcttttccgaaaaaatcgctacgtccgcaagttacacccatagaaggcaatatcaaggttatatcgacagcctctcctcctgccgcaggataaatacggataggccgagaatctcccgtctgagtcccgaaagttccggtctcattctgcacgatgatattaccggcatcatcgacacaaatacccatactaccttgcgtggaagttaatgtagattcttttccgtctttagtccatacatcgacagtaccatcatttttattctgaatataaaacttaccgttcgcatacgttccttgacgcatgtttgtagcatcacccactggcgttttccattcttgtgtaattgttgctaattgtgcagagactcccacaacagagaataatgcaactgcacttaaaagtaattgtttcttcatttctagatcaatttaagttaataatatgtttttcatttatttaatttatttgatatatatcacttatttaataaataaatttattaacagttcaaatatatagactaatatttatataaccaaattttttgtgtaaaaaatttggttatatagtattttttatcagagatttattcttttccctgataaaggtttcattttcaaggattttccagatggtaaaataacttcatgagcctgtgtatccatatttacgacataccagacacgttgcccgtccttcgactgccactcagaacccatcaccacatggttctttccgaaagtgggaacatcgatctgcggattgtcaccaccgggaacaaactctctgatatatcgtccctcgataaagatatcgtgctgtttctttcgtaattccatcaaagtgcgcaggaaggtagcctctgtcttcgcctcgtcacgcatcaatagagtcgggtctacccaaccgagttgagaaccgtacaggaaacattgcatgttctgataacggaactcgccttttgtcacgtcggcagtaggagtataagtgtaggcgcaagttattacccgatcggaatagaccgtaggaaacaacggcacgatactacaattggcatggggagtattcactgtcaacaacatatcgaacaaaggaatatagcattccgaattttcttcggagaacacaatattatcctttctcaaatgattgccccgaatcgaatcgattaaagctttatacgatttataccaaaaatctccgcctcctgcggcatgtccgtgattcttcgcaaaacaaggctgaggagccgcagccgcaatctgatcgatatacaccccgttcgtatgcaattcgttttgaattttatcgaccaatccgataataatcttgtgccacagacttgaagccggacaagtgaccgtattcaaaactttcgacgtaggataaatttcggtataaagcgtaccgtcggccttacggcaagatgcagaagctccattcaaagctgtataactatcggctgcgggatcccacaatcgaccgtttatataagggacggcatgacatttccgcttttgaatggtagaaatcattccttcaaactccggtttagccgggaaataatcgggataatgtgtatcataaggatagttatgccaatagtaggtatgtacaccgataccttcaccgaaaaaatcgatcgtcttattgatagccgccataacggtatcggtaacacctttcgaacgtatccacaaatctttatccaacaaccactgcggtatattgcgagactgcaatgatttatttccccactcacatgtaaatgtaaacggcctgtaccattgcagtgcagcagcttgccagccgtctggattatagccgacaacagtagtccacggcaaatcaaaacgcccggtcgtggcatcggtccacccctcggaagttaccacctccgtcacaaaagtaacactcttgcttccacacacggcccgcaattcctttccgcaagcattacgatcttcggtcgcataataaaaagaaccctccccgttatgcatcaacaacagttgcatggagccggtacatgatggataagttactttataggcgcctcctgtcgccatatcaaattcattcccccagccggcagaagtaatcatcttcccgtcttttgggcgaactactgctatacgcgggaattgagctttggaaataacccaacccttaggaagatcggcggtcaaatcccaatacaacagttcggaatgatcggtagccgtcactttcatacgaataggatacatacgtttctcatacgataaacgcatatcccatacgaacacgacagaagcagaggtatcgttttgtatcacctcataacctttatagactccatgttcgggaaacaacatgggattttctccttgaatacctttataagtgagtacccacggtatggcattcgtcgacggaacgaccatttcctctccatcgttcaatttcatcgattgaatattgaaagcctttcctttcgggactatcaactccacgctgccattaccaactttcactgcatcagcagtctcctctaccaaagctctatgcgttgcaaaagccggcaaagttacccaacaagcgaaaagggcaaaaaatacccttctcgctcctaagaaccatttatcattcattataacctggattttgtgttaaattcgggtctttatttctctctgattgcgggatcggccacaaatagaatttatcgtcccaataacgactttgatccctcacgtgtaatttatccgaataggcatcatacgaagcgatatcgttcaaatcgtgacggtcgctagttttgaaattgggaatatcggttgcctccatacctgcatacgtcacagtcgacaaaggcgctccataacttggtttagcgttttccaaatcgccaatttgccaacgcctcatatcagcaaaatgtaatccttccatcgccaattctacctttctttcccgacgtaccaactgacgcattttatctatattacctttacgatcggacgaaacctctggcatgccggcacgaagacgcactttattaatcgcatcgtaaaccgtatcgtcgagttctcccaattctatttttgcttcggcataagtgagcagaacttcggcatatcgcataatagcaatgttacaagtaaccgtcgaataatcttcggtaagtccacctacatatttgtaccataaataaccgcaaccattggacacaaaactcgtccatgctgccgttccatttacatcgggattattcgttttcatccatctttttaaagccgcgttgtacatttgagtctgattggcaaaagcttccactataaatttattcgtgcccgaagccgtataatagtcgatcgtatcgccatgcattttcaaagtagcaccgaaacgagggtctcggttcttattcggagctttcgggtcatacaatggagactcgtcgatacggagcccgtcgatacactcatacgtatcggccaatagactacccggatgctgtccagtctgagcgaacatacgaggcccattgcccaatgcaacccaatgatatttattcgtattatttaccatttggtcggaatacatcaactcccataacatttcattacgcacatcggattttgtctgtccttctttggtaaacaaatcggcaaagctcttagccaaatcacgttgtccgatcactcgattagcggcattagcagccgtacgaaaataatccatcgctttaccaccgaaattaaggctgccggcaaacagagctgctctcgcttgcaatccataagctacagctctatccacgcggccgcgttctgttgccgtccagggcatttcttcggcaatcaatccaagttcttcgataacaaaatccataactgtttgtctcgaagtgcgagatgcattataatcctcagtggtagccggtttcgtaaaaaacggaacatcaccgaaagcaacgaccaaattatagtaagcataagccctcaatacacgcgcctcggcatagtaacgtttagcctcatcgctcatattttcaatatttcccgaggctccataaattacagcattagctcgtgcaaccaatttatacaaaccagaccaatacgccaatatactactattgtcgggagtacaccccgaacctgcgccaatggtcgtattctgagctctctccatactcaatcccgtaaaattatcgatagtgacgacagcaggacgatgcgacgagttcgtaaacgtcccctccatatacaatagattgtaaatacctacgacaccctccttcaatccggcttcgctctcataaattccaccgctgtcataagagggagattgagtatccagaaaatcggaacatgccacgaaggcaatccccgccagagcgattattatcttatttatcgtcttcataatcatattttttagaaatcaagatttataccgaaattaaatgttttcatcaccggatacatagctccgctggttacaccggtttcgggatcataacctttataaccactattgatcgtaaacaaattagaagccgtgaaatagagccgcaaattatcaatggacactctgttcgtccacttcttgggcaaggtataacccacagtcaaatttttcaatcgcaaataggctccgctcttgatccaaaatgaagatacaatattattcatatttgtagaacctgcatcgactaacaaaagaggatattccgcatccgggttttcggggctccacgtatcgagctggctcttgaaaatcgtactgttttgaaccaaaggtcttgccccagctccggaataatacaaatcacgtttaccgactccctgaaaaaacagagacaaatcgattcccttccattggccgccgagcgtaaagctatactcataacgaggcgtggaattacccaagataactcggtctttggagttaatctcaccatcgtgatttacatcgacataacgtatataacccggtttgatattcgctttgttccctccatacacgcaatcggccatatcaatttcttcctgactttggaaataaccgtcggcgacataaccgtagtacgatccaagtgcttctccctctcgcgtaatcgtcggcgacgaatcatattctttcccgtaaagattggtaaccgtattctttacatcagacagattcgctttcacataatacgataaatcgcctatcttgtcttgccaaccgatcgaaacttcccaaccgttattgcgcatagaaccggcattctgccacggagcactcatacctacgaaatcaggcagatcgaattgctgaagcattccgctaatgttacgaatataataatcggcagtcaaagacaaacgagatttgaataaagtaaggtccaaacccacgtcaaactgtttagacttttcccacgtaatcaattcgtttgccaattgagcctgagcgattccggtcgtcagttttttatcgaaccaataattgaccgtacccgacaaactatttactgctgccacgtagggataatagctaccgatagactggttacccattgtaccatacgaaaccctcagtttcatatcgtccaccacagtctttgcaggctcgaaaaacgactcttccgaaattctccaaccggccgaagctgaaggaaagaatccccacctactctccgggcggaaacgggaagttccatcataacgtccgtttaattctatcaaataccggttatcgtaagaataatttacccgataaacgtaagacaactgcgccagttcatatcggttactggaattaccggcagtagttgcatcgccatgcattaaatcttcatagccatcgtattggaaattttgacgactggctaatagataattataatcaagtttctctgcttggaaaacgcccattaccttaaaataattacgttctatcgttttctcatacgaagcctgagcaatgaactgctgattcactgttttcgtacgttcttcttgtcgagtaccattattgctcgtcgaaggataggtcatcatgaaacggcctccctcataagtatcgtaaggccgtataaatacagcaccctcggaattcacctgacggcgagtatagtcggctttcaaataaagaccttccaacggagtaagctcggcaaaagccctgaaagtcacttcgggagccacatctttacgagtacctccgtcgttcactatggccaaaggattatatccggttcttccgtaaccataagtaccatcgtcgttcaatgccgatgtaatcggagtcatggtaagaatgctcccgataatacctgcggcagaatcctgagaaggacgtatagcagtagcttgccgtatatgggcatcgactccgaccttcaaccatttccgaacctgcatatcggtattcaaacgtaatgtagcacgcgaaaaactattattaggaattataccgttttgataataataccccgcattggcaaatacattcaacagcttcgttccaccgctcacactcaccgaatgactttgctggaatcccgaatctttcaacaccaaatctttccaatcggtatcgtaatagttataattatcggctccctgagttttatatatctcaataatatctttatacacaggatcctgaccattattgacataagccttgtccatctgagtcatatattcgattgcacttacaggttcgggcaagtaggtcggtgtcgaaaacccggcataaccattgtaatttacttttactttaccctcggctccacgtttggtcgtaatcaaaatgacaccattcgacgcccgtgaaccataaatcgaagccgatgccgcatctttcaaaatcgaaatagactctaccgtattcatatcgatacgattcatatcgccttctgctccatcgattagcaccaacggagaagtcgatgaattgagcgaaccgatacctctaatctcgatagaagcgttatcggctcccggctgacccgacgattgtacagccgacaatcccggcacaattccctgcaaagctgtcgataaatttgaggtactctttcgaatcaagtcctgccccgatacgctttgcaccgcaccggtcaaattcactttcttctgtgtaccataccctactacgacaacttcatcaagttccgtcagagaagaagataactttacattaagttcattttccttaccgacctttacagtcttcgattccattcccacatacgagaatttcagcacatcaccctcgctcgctttaatggcaaaacggccatcgatatcggtactaacagcaagcgatgtcccgtcctttacaactgctacacccggcaacggttctccgttatcatcggtaacaattcctctcaccgtcgattgcgctatcgccatcgatggcagcatgaagaagagtagcaagaaaaacaataaatttctcgcaactccttttttactcgaataagacgctttcataaaaaatgtgttaattattatatactctctaatatctgccaacactgataaagccccctcggtacatggaagcaacctttccactttccccctttcaacgggagcaacacttctccccggcgattcaaataaccgaaccattcgggatattccttgtccttaaaatgagaccatgtataatcatggattttttcgaaccattcccaacagcccctatcgccggtcatttgatatcccttcaacatagcgatgagcgtttcgatatggacccaccacagtttttggtcccattcgagctcctgcggaggatatcctttcatatccataaaatagaacaaacctccatactctttatcccagccgtagtttaccatcttcaatgccgtatctttcgctttcataataagctccggcctattcagcctttttcctaaatccataataaaccacatcgcttcgagcgaatggccgggattcatatgacgcccttcgaaacaatcggaaagctcaccgttttcaagaacattttccacgaccaaacctcccaattctggacggaggaaaatctccataacctcatgaatacaattttcaaacgttctgctcagacactccgtactgagcaagggttctatttcaagagccagattacataaaatcattgggagtgcgaagttcttcaaatcacgagtccctttatgaatcttgttccatttacctttggggttatctgctttcgacaagataatatcgaatgtcttcttggctatttcggcatactcctcgttacctgtcgcgatatacagctgtccgaacgccatgaccgcaaaggtatacgagaaaatattatacggttctacaagaggatttccctgacgatcgagagaaaaataccaattgtaattcccgtcatgcccatactttttcaagaattctgcgccttgaatcgcacaatcgagccactcgcgacgcttctctactttattgtaaagcatagaaaacagccatatttccctcccttgtagccaaacgaacttatctgtatcgtaaacgctaccatctctatcgaggcaggaaaaataacctccatactccttatcttgagagttctttaaccaaaatggtaatacagaatcgaaaagctccgatctatattgctctgccaacactttaaagtccataatatctaaattttaactatttcctcgacaaccaatacttttctatctcttcgagagatttccccgccgtttcgggtatatagcgccacataatcagcatataaggcacacacatgactgcaaacaacaagaatgtcccggccggagttatcgtacccaataaccacggagtaagctggctaaccaaatacgttcctacccataatgtaaatccggcaatggacatagctataccacgcactttcgtcggatacatttcggacaacaacacccacacaacagcactgatcgaaaccgccgtacaaaatacatacaacaagaaaaaaatcagcatcaatatgctcgaaaggcctaacgattccccgaacgagaaatagaaagcgataagtaacaacgaaacgatcattccgctgacgccatagtacaccaatttcttacgccctattttatcgatgatgagtaatgccaatactgtcgtccccatattcacgacaccaatcaaaacctgatagaaaagggaatcgcctcccgacagtccggcattttcaaatatcgtaggcccgtaatacaaaacagcatttacacccataaactgtcccaaaatcgcaatacataatccggcaacgacagctgtaagaattccgggttgaaacaaatacttgaattccgatttcgtctcgttggctatatgtgcctgcaactcctcgacctgcttcttcgcccgttctttccgagaataaatcttcccgaaaatagactccgatcgggctacctttcctcgcaacaacaaccaacgcggactctccggtataataaacaaaatgatgaaaaacaagagtgcaggcaaagtttccatacccagcatccctctccaaacttcatcgacaaatatccaattcatcaactcactatcgaatctcatgctctccgagacactcaacaaccaataattaataaggtatgctcccaaaaagcctacggtaatagccagctgatacagcgaaaccaaccggccccgatactcggttaccgctatttcagagatatacatcggcgaaacaatcgaaacgataccgattcctattccaccgacaatacgataaaaaacaagccattgataacttccacacaatgcacagccaatggccgaaaccgaaaacataatcgacgcgaaaatcatcgtcagccgacgacctatccaatcgctcatcgtcccagccacggcaaccccggcgatagaacctacaagagcacaccccacataccaaccctgttctatatcatttaacccaaacaaggttgtaacctgtttaatcgtaccggaaattaccgccgtatcatacccgaacaggaaacctccacatgcagccacaacagccaaaaacaagatataaccgatattatacgatgattttttcatggtcactttatttcgaaatattcccgataacgatcataaagatgcccagcctgtaaataggccgattgagggctcataaaatgagaaaactcaaacgtaatagctttgtcgtagccggcacgtttcgcagcttccaatttcaaacgtaatttatcgaacttaatcgggaaaaacttaatgggcatatcccgatcgaacgattccgcattcgtccaacattgcatgccgtatttatcggcgagtttcttattgaccgaaaaaaacgcatcgagttcgtcataatcgatatgcccgtcttgaaatgcacaagcatcgaccacatcgtgtattccatcgaagatctcgttccattcccgttcatgcgtttccaccgaaatagattcggcctttgtcaatcgcccgctcgaagcctgaaccgcctttttaccgtcgatccacggcgatatgaacgtaggtaaccctcccgaaacgtctttgcattgtttccccatagtacggaaagcatcgattgcccctttggtctggcggctgatttccccgcttatataccagcctccgaaacttttgtacttcccgtaattcttccaaacctcatcaatcacatatttattatgttcgatctcgtaagtcatatcccgggtttcccaaaacttaccggaatcgtacaaaccgaaccaaaatttcataccatatttctcggccagccgaagaaacatatcgaccaaatcgaccgacggcatataacaacctttgctcaacaaatacttagacggataagtaataaattttttatatcccgaacgaataagtatgaccgtatcgattccgatggctttcatataccggaagtcccgatcccattctttctcaccccaattctgatgtggaatatcgtgagatatttcgtcgagaaacgtccctgtgattttcaacccattagatttagggacaataagtccaccgccctccgaggttccagaaaacgacgaagacacaccattactacccaatgcttctatttgagaacctattaccgccgaggttccagcaagtgcgacttttttaagaaaatctctcctgttattcatgatatatctaaaaatatactgtgttttatgcaatagttaagctaaaatgttaattacttaactatcacacctacaaatatagtatatttttatttatataccacagaataaataaaaaattttattatatatacttattcttcgaacattcgacttctcgatattagacaagaacctatcaaaccggcattatcgccaagtttagaaatcacaatcgtcgtatcccgattgaccaaattgagggaatattttcgcaccgccgtcttaatcggttgcaaaatataatccccggtaagagacaaagcccctcctataattactaactccgggttaaggatattaatcaaaccggcaatatgttttcccaaattattacctatatcttcaatcaaatcgatgcacatcacatcgtctttttccgttgcggcaatcacatcttttaatgtaagggcattcttctctcttattcgggaagacaacaaagatatttctccgtttgcctcccgctccatcaatttcctaattaaagccgaaccggaagcctcggtttcgagacagcccttttttccacaatggcacaatacttcattatcgtaactaacgacatgaccgaactcaccggcgaaacccgatttccccgtatatattctgccatcgacaataatgcctatccccagtccccagctcacattcacgaatataatgtttttctcgccatgcacatttccttgcaagtactctccataggtcatggcacgagtatcgttctcgatagtcacattataccccagcttttcccgaagaacctccgccaaaggcctctcttcgaaattaaaaatactataactatatcccgaagcaggatttacccgccccgatatattgatatttatattcaaaattttctcactattaatcgagagagttttaataaacttctgtatgataccggctaatgcatccaagctctctttggtattggcattcttaaacggcacatctaatttcttatcgatcaagtcgcctctgaaattcacaacgccgatatgcaagctggaatgcttaatatctacaccgataaaataccccgactctggattcaacccatataaattgggatgccttcccccattcgtttccaacttcccatagacattcaagtagccattaccgcacatctcatcgataaatttcgtaacagtaggcacactcaaatccaattctttggacagctctgtaatcgtagaacaaccattctgaatataatgagtaataattctcttctttataagagaatttttcgaccctttctcaaactctttcaacaataaatgaggcataacgagattacttttttcgacttacattgataaaataggaataaaaaacaaacccgatcgaaatactcccgtcaaacttatctttattcctgcttgcgctatctttccgtaaaaataataaatttgttcaaaacagagaaattaaataaatatatttattaatatttttatcgacaaattcattaccgaccacctttatgattacaaacagacagaaaccaaccgtaatcctacacatctactcgctatatcatcgcacaaaacagaaagttattttttagatatgccctatcatctcataaataaaagaacggagagccgaattcgactctccgttccaccacgaatctaaattcttacttatttattcctcaactttgaaagcatcgatctcacggataccgggaagaccatagttagcttttttaagaccgttaacataaacagtcataccaattctctccggatggccttcaagtttagcagcatctctcaaactcttagcggcatcagtatcatttaattttaccaaaagacatttcgaaccatctgtctcttctgcattatctgcaataaatacttggctataaccagtaaattcagcagcaccggcccattctatatctccggcttgtttagcttcatcgaacgatttataagaagtctttgaagggttatttttaatacaacctacaacataccctttaaccgcaaaagtttcgccatttgcaatttccaaagcctcggcaacagtcttagcttttgtccaatccacctcgggtgtaggttcaggttctacaccttcctcgatgaaatgagctacctgattacggccaaaagcaaagtcgtcaatacaatatgttgtagatttgcctttaccgccttctgccgtataatggaacccgatataaacgatatcgcctttgccctccaagctgatattgcccgaagccacccaaccaccgaacgggctactaccaacaggattagcattcgcctccgttgccaaattaacttctaacttcactttggaagaagcggtcgatttgggttcattcatcacatacacttcgagtttggtagagttttgccaataagcaccttgactataaaaagagaagatttttttatccgcctcttttacattcaaagccggagaaatcatccaccagtcataagccaaacccgcatttttatcgctgctgtcgtgagcggtagcctgaatatatttatctaccgagccatctgtcttacttgtaaaaatcttgctttgccatgtacggtcatcgtcagacggggaaataatctcgtgagtccaacccgggcacaactcattgataggcgtatactcagcctcgatattgttgaactgataaatcgtatctttcacaacaaccgacggagtactagggtttcctccctcacctccatcgccacccgtaccgggcagatcctcgtcttcactgttcgaacaagcggagaatcctgcaactgtcatagctgccataaaaatccatgcaaattttctcatctttttcatattaaaatttatttggggttaaaaatattattacgattcatgcaaaaataggttgtacctcggcataaccaatttcatttgatttcgcgcccgactcaccctattgaggaaaatcgaatcctttgagatcggcaaacggcttatccagcgaccgtacggtcaactgccaagttccgtcatagtcctcgttatcttggaaccaccctacaatcgcagtaatttctcctttgttgccgctaccgggggtaggaatgcgacgatcggcaaaccgagcatactcactggttgatatatatacatctaccgtattgccactgtcatcggcaatctctcgggagcgagggaacccgatattatattttttattgttatcgtaagtcgcaggagcaaacgtagggttcaaagcgtacttcgccaaagcggccgtcacattctttccgtccgacgggaacggaagaatctcatcgttcaatttctttccatcggaatcatatcctgtaaaatagacatctttaatcttcacgattttgaaataaccatatttgtccatttcggtgatctctttcaaagtcttttcttccacaactattttagaaggatcgggagttcctatcttctggatatgtttcatcgccagcgtataagggatacgcccgggctcttcacgaatcttgttgtcattgcgatatccgcgtactcccaactggggtgctgccgcataacgtcccaaaaccaatccgttacagcgaatagctaccacttgtcccaacggcaacatacccgaaagactgccggcatcgaccgaaactttcaaacaagtatggtcatcgtccagactttgtataacgaaatatttatatacgttgcccgcacggtcatcggtaataatccgacctctaacgatgatatcgttgggagaatcgatcgtatcgattgtaaacaggccctctttcgtatcgaaattttcgataaggtctttaatagttaccgtctggggccaagcctcatcgctgccttcgggaaccgtagcaaaatcttcgggaatggcatcgaattctttttcacacgccgtaaacagcataagagctgcaaatacgacaccgatatattttaattgtctcatactctaaacgatttattaaaatttgaaaccgacattgataaacatattgaaaccccaagcataataatatttattggggaatttgtccaccgattgtatatccttggttacactcttgttatcccggctgacacgaccttgttgataaccgccggtaatcatgctggtattattgagaatattattgaagctaaggttgatattcaactgttgcttacgattgttgagataaatcaatttacctaccgaagcatcgagtaagaacccgcctttaagtttctcctgcgaaccgatcatcgccttctgattgtagtacttaacgatatcggaacctttattcccggtatagtctctaacaagaacaggtttaccagtcttttcatcaaagctccaaaccatagaagtttggccattcttatcgataccgataatgcgatagccgttatagttctgctccaatcctacttcattgggatattttccgccatacatattcatgtgcgtgaaacgcgacggagagaaatcgagataattgttatcgaagtaagaaagcgttatgtcggcaaaccacatcttcgggtgaaaataatccagcgtaatgcttgcggccaactgaggaccgttgctcacatgaagaccttcggtgtaaactttttcggtataatcggtcgaagcggcccgcccgtcgactataaccggtaattgttcggtaaagagattcataccgttctcggcgctcatcgttcccatacaatcgttggtatatttgtagctgccatacgttcctgccgccgatatagtgaagctgctgttcaacttcacactcacaccggcctcgacaccaaagtgacgtttattcacgcccgacaatgtatgatttacatacgtgcggaactcatcgtgataatatcccgtactttctacgccatcgcggaattccgtgaagaaccctgttacccgaccttttacaatcgatgtattcaattgataggtcaaatcggccgagaatactttctccgatttcaaacctctgatacgagtatctttaatacgaggcgctacataggcataaccagccaacggagcccgagattccgccaaagcatttaacgacaaacgattatgtccgtctatcttatatacgataccggccttgatactgggatctataaaatacatctgtttaccgaagcccttagaccgggctccaataacctcggcacgaccgtttctcatcaaaccttcacgttggaaagaggtataggataaccgtgcggcataatagatatcgaacaagggtaatttccaatcgttctgtataaatgccgaagcattgataacatgcatattgtaattatatccgaacttatcacctttataaacagctcggttcgggtcgtccaaatcattctggataatgtcctgattgtcggtaaagtcacgttcggcaaactggtctatatcgatccactgattagcccctaacaagtcatcgacggttttgtagtgcattcctttcgcatacttggcttcgataccggccgtcaatttgagttcgctattcagctgattggtgtacaaaaagttcaaaggtatttccatcaagttgttgtgacgacgctccaaaatatacttggcacttccgttgggattaatagcattattggtatagttcgcgctatacatcgcattccaattaatctgggtaacgttaggatcgccggctctccataaatcggcaatctgattggccaatcccttattcacctctttgtaataggcattataaatatcgtcaggaccatctaccgccaactgataatattgccaactgggcaaattacggtaataatcgggacggggatcgggagcgttataaaaagctatcgccgaattactgtattggctgtaatggaatcctacgccggcagacaatttgctctcatcgtcgattttccagtcccaattaaaaattgccgtagggtcataactgtgaacgatgcgggaattacgcttttctccgtcttggtatccccaataaggattgtaataaattccccgataatcgtaaacctcctgtgaaacggcagccgactgtgcccgtttggtcggtgcaccgaatgtcgtcaaggcaaatcgatggtcgcccaatactttctcggcagcaaggaaatagccgaaagagttgtaaaaggttccttccgtgcgtccctcatcggcccaacgataaacgaccgacccggtaaaagcccaaccgttgtccataataccggtcgagtagatagcctgtccgcgcaatttataagcacgattcgtgtaagcggcatttacattcgtacctgctgcatagttggttgcccgcgtgttgatgttcgtcgttcctcccaaagaaccgtaagcatatcccggcatttcaagaccattcacggcatctttatttctcatggcattgttcaatcctccgagactcgaatagttgaaacgaccgcgttccaaatcattaaagttaagtccgtttatataggtagaagattcccgttgttcatatcctcgcacattaaaacgcatagggctatacgaataactggccgcttgcaaataaacatcgtcggcagcgccggacagataggatgccgattgagatgcggcactgccctcgtcgtctatcgccgactcgtcgagctcgaaaatattatcttcgagagcctgttgattgagtgtattgcctactttcttaggttgcaaagaagcattcaaggtatttacgccgtcatttaccacaaagtcgacagaataagccttataatcagccgccgtaaatacaacaaccacagaccctgccctaactttctccaactcaaaatttccgtcaaaatccgtaacagccgacacgttccgtatcgcaacttttacattcgcaataggtttgtttgtttcatagtcaacgacaacacctcttactgatgcggcctgaacaaaagccggtacgacaagaagccatgtcattaataaccatagtttacgattcattacatcaaaaggtttaattataactgtgtttatgtttacaaccctattcccccttttatcaaggggcagaaaaggaatttgcaaattaaaagattattttccattatacaaacttctacgttgggaatatttattacaatcgtgttaaattgtaaccctatataaaatgttaattatcggacaaaatgcaagaatttttgggaaataagctaactttcaagttattaaacctatcactatgttaaaaatacctttctaaacgacaactgttaaatcatatctcacccatcgtcctaatacattatcgccatcataaacattagagctaatgatgatatatgattcttacgaacgtcgcacacggaaagatgtctttaaacgcatttcttcctaccgatagagatttattcctaaaaaaatttcgcttatttgtcaaattagagttatcttgcgccacattttaatttaagtcgaaaatttcaaaaacaaaattccacacgaactatgaaaaaaataggattcttgctattagccgtattcttgacaggagtgactgttacacaagcacaaaagaaacaatacgctatatatgcggtagcattctacaatcttgaaaacctgttcgacacgattaatcagccgaatacgaacgacgaagaatttactccttcggggtcgtaccgttggggcggattaaaatatcggaataaactcaacaacctagcttatgcgattagcaattttgccacagacaacagcagcccgttcaaattaaaaaacggacctgccgttatcggcgtatcggaaatagaaaacgaacaagtattggaagatttgattcataccggcgaattatccaaacgaaactatggaatcgtacattacgactctcccgattttagaggaatcgatgtgggtcttatatatgacaaagaccaatttacactcgaatcgagccgtagcgcacgacttcatacccctcaattccccgacctacgtactcgcgaccaattagtcgtttcgggaatattggccggcgaacgggtacactttattgtcaaccactggccttcaagactcggcggagaaaaacaatcgagcccaaaacgggaagccgctgccgcactgactaaacatttggctgactctcttttagcggccgaccccgactcgaaagtcatcattatgggcgacctcaacgacgacccgtcgaaccgcagttgcaaaaccgtattaggggccaaaaagaaacaacaagaagttcaggctggcggatatttcaataccatgtgggaaatgttcgacaaaggcataggcacgttggcttataacggttcttggaacttattcgaccaaattattatttcggggaacctgttagggaaagatcgctccaccctgaaatatatccggtcggaagtattcaaccgggatttcctaaaacaaaaagaaggcaagtacaagggttatcctttgcgaacccatgctgcgggagtttatctaaatggttacagcgaccacttccccactctcatctatttagccaaagagataaaataaataaagctcgaaacacaaaaagaggggtgatattgttctatcacccctcttttcattttctccggaattaaaatataacacgacgagttatcctatcttcattcgatgacaatacgataacataaattcctctgggataatcggctgtcgacaaaacaatcttcccccgaccatctaagtattcacaccaaaccatacgaccagaaatatcgaccaattcgatcattcgaaattttgtatcattcacagcaatctctaaatttctgccatttcgaatgataactatatcatcatctctatccacctcttcaattccgctataacaaggatcattcaccgcatccgacgtttcatattcgatgttaccgtcaggacctttgacataaaccaatttatcctgagtatccaacccactcacatcggtagaacaacccgggcgcagcaaatcaccgtcttctacacctatcccttcgatccacaagaccttatctcccgtccaaaatcgctgccgaagtgtattggcgatctctaccgtatcgattttactaattgtcgaagatacggatttctgagtaatccaatcgaaatgagtgatggtctcaccctcctttacgccgaaatcataaataagatattccctatcacacaaactctcgacaggcataaggagtttattaaaagttatataaacctgtttcccggattctcggataaaagccaaattttcatcggccgtctccgaacaagacttaaaagtgtaaaactttttatacgcaatgtcattgacaatggtatcggcttgtatcagatttcgataataactctttccgaataattgctgggaatatccccactcgacaccgtctcgcaccaaagggacatactcataatgcgcagcttttatattcccgaccacggcgaacaaaagaacgaacaacgtaatttttctcataactatcactttttctttaaggtaatgaaataatttatttgtaaaaataatatatatcattgaatgaatctatttttattcaatctttttaccgagattgcgatttctacaaaaaacatgaaaatagactgtaaccctactcaatcaaataaattgatttctgctctcatttgcaccatctttgcgcaggatgcgaaaataggctacattcggcaaagtcaagcgagcttgcttttgccctcatttgcactatctttgcatcgaattttcaaaagggattgccccatgactcagaaagcgaaaacttatatgctacccgtcgcaatggctaccggaagtttggcgggatatttactccccgaccttacagcccgatgggctacacttctggcccctatccttatttttgctatgctgttggttacctactgtaaaatttccccgaacgatctacatataaaacctctacacggctggcttctcgctgttcagattatcggtggattaaccatattcggtgcgctttatttttgggatcctatcatagcggaaggaactttcatctgccttttctgtcccacagcgacagccgctcccgtcattaccggaatgctcggaggaaatgtcccgacactaatttcatacagtctaatcagcaatatggctgtggccattttatcgccgattattttttcgttcatgggaatacatgccgacatctctttcctcgactctttcctaactatatgcagtaaagtgttaccactgcttatcctacccttaggagtggcaatcctcttacgacaatgcctacccaaaatccacacggtattgaataagcgacaatctctatcgttttacatgtgggcagtttcgctttttcttgtagtaggcaaagcggtcacattcatcatcggacaagggagagaagctatacctctcgaaatcgctatcgccctcctctctttgatcgtttgtataggacaattctatatagggcgaaaattaggtggacgatacggcgataaaatttcaggagcgcaaggattgggacagaaaaacaccgtgcttgccatttggctggcactcacttatttgtcgcctatcacatcgataggcccggcatcatatatcatctggcagaacagcatcaatagctatcaactttacttgaaagaaaagcagacaatgaaaggctcttagaaactgttttcattttttcaaatcgaatcttttccggtcgaacgacctcaaaactattccaaattcaaatataaaaggctaattttcctcttcctcctcattcaccgccggaagattctttttcgctttcacccccatgactttaagtttctctacacgtcctatcagatttccgttgccggttttcagttttttcatggcatcggtataagccatagccgtcgtattcaatgatttaccaatcttctccatatcctcgacaaaaccggcgaacttatcgtacaattttccgccctcctcggctatatcgattgcattgcgggtctgcttgtcccgttgccacaaatcggctacgagtttcagtgcggcaatcaaattcgtcgggctcaacaaaagcactttcttttcataggcatattgccacaaagcgtgatcggcctgcatagcagccagataggcagcctcgttgggaataaacatcattacatgatcgcctttcccgacataatcttgatagctcttcccggccagctcgtctatatgtttcctcaccgatactaaatgctgcttcaatgccaatcgagcttcgtcggcatcttccgcattgacgtaattgacataagccgtgagagatactttcgagtcgatcaccatttgatgattttctccaccgggataacggataatgacatcaggacgcatcttccgcccatcggagccctgtatggtatgtccctcttcgtcccgcaaagtttcctgtatgaaatattcccgatccttttcaagccccgatttttcgagaatactttccaatatcatctccccccagtcaccctgtattttggaatctccacgcagagcatgagtcagctgttttgcctccgcacctatggattcgcttctctctaccagctctttaatctgttctttcaacgaaaaccgttcgcgagcctcattattataagtttcttccacggtctttttaaatccctccaaacgctctttcaagggattgagtatttcggcgagacgttcgtggttcatctcggaaaagctcttcgatttctcctgcaatatctcgttagccagtaccttgaactcgttgttcatctcttgccggatacgttggacttcctgcttttgaacttccatattttcggaaagcatttgattacgggcttgcagatcgcctttctcacggttgagtttctctcgctcccgattagcaaaatcgagttgtgcctgtacctcggccaaccgcgccgtacagcttttcacctgcgcctccaacacaccgttgcgtaccttcaagtcagccgcctcgctttcgcgtaccgccagcgactgctgccaccctttacgactcgaattatacacgacaaaaaataccacggtagcaaccaaagccaccaatataccaacccctactgctatcataatgatctaatctatattcaacacctcaaaaaatcgttgtgcaatctgctcgaacccgttattacccggatgagaagcgatatccttatcggtagttatcgtttcatatccttgccaagtcaatgttttagcctcggtattatcgctataactttccgtttgcacaatggctttgtatttctttccaccgacattaaaatctatttgtaaccgattatccgacaacacggtataatgggtataattcaaggactgagaggtcgggtccacacgggtgataaccgtacctatcaaactgcgattaccggctttgttaatgccgtctatcgctacgagggtcacggcatattgtttacacgcattttttacagacttgatgacactattcgatacataccagccataaatccacacgatacgagcccgaggcgcataggcttttatggttgcgatcagctcttttgccccttgctcgaaggcttctcttttactcgatgtatttacattatcgccaatctgtataacgaccaaatccaaatcgtcgctcaacacgggacacaatctattatccaaccaatccatctgttgagcccggttttcacaagcctcaaaatcgactcccgataatttcgtatcggtataggctggattggcttttaaaaactttctttggataacggcatgataatcgctcgccgagtcggtcgcattcattccgaaagcgccattacccaatagtaaagaattcccgataaacagagccttatcaggcatttcaaattttccatgatcgaaaatcaagtcggttagctcctctccaaaaaatttgtcgcacgaggccatcgttatcgacaaaatgataaggcataagtaagaagagaaatatttcataagcctatacaaacaattgtatttgaacaatgtgacaacaaagatattaaataacatgaacagaggcaaacgaaaaaatcattcccgcataaatattctgcatcacacctctacaaacagacgataaatttcactattcacacttttataattacttttgtacaagtaaccgacaaaattccaacgcatgaaattaggagatgtatggttctcggccattgccgaagccgaaaacagtgaccgcatgattgtcgtttcgggacgtaccgagatagaaccgttcattcaatcgggcaagttcaaagaacgtgttgaaatcacatggaaatacgaggccgatagtaaaggcatgcccaatgagactaccgggaaactgatggaagaagtgcagaccgtattgaaacaggctatggaaaaagataaactggccattttcacaggaatctataccggagacggcgaacgcacatgggtattttatacccgcaatatacctgcattcggacgtatgctcaacgaaactctcgctccgttcgaaacgttacctctcaccatctataccgagaaagaccccgaatggaacgaatatcgggaaatgtgcgagcttcaagatcaggataatgacgatgaagacctcgatgaatgaaagcgatacagcactgaacgtccattcgcacaatgaaaaaagcgctcttacatataggcatattcattctgttttcggctcaaatagcatgttcacatggagaagacgaaccggaagatattactactatctctgttaatgaaccgggctccctatctgaaatcatcgcgccgagccaacgaggcagtattactaaattatccgtaaaaggatctctaaattatagcgatatttcctatatccaccaaatgccggaattactttacttagatgtaggaaacgtcgtactgcccaacaactacttcccggataatgccatttccagccatgaaaaattagaggccgtgattctccctgtatcgctcgattctatcggggcatcggcatttcgatggtgcgaaaggttgcaagccgtccgcctgcccaaaaaacttaaatccatcggagcgtatgcattcgccggctgtatcaatctgtacgatatagaattacccaactctttgctatatctcgaaaaatatgccttttccggttgtaaaagtttatataccttgaaaataccatcgaaattacaacgtatatccgactatactttttccaaatgtatcagccttaccgaaataaaaataccgggaagtatccgggaaatagggtataaatcattttcgggttgcagcggactccgagaaattagcatcccctcgactgtcaaaacagtaggtatcggagcctttgaaaattgtaccgaattaaaggatatatccttgccaacgactcttaccgaaatcaattactacacattctcaggctgtaccagtctcactactcttactctacacagcaagctcaccgctatcaacaactatgctttcgccggatgcaaaagccttactgaaatacattgtaaaaacagcaacccgcctttgatcggagaaaatacatttcgagacgtaaaccgcatcggctgtaaaatattcgtcccgtcgaaacgagcgaagaaaagttatagtacagccctctattggaatgaatttaccatttatatagaatgacacctactgttctttattcgaatcaattataatgaacagaaattataatactaaaaaacgtatttttatcaaatcaagattttaatttataatttttttcattatacttgcattaaacaaaaaaacaatctgctccatcaaccaacagaacatacactattcatattcttgtaaaatcctaaacgataaagccatgaaaaatacattacttcgaacagtcgttatcttcgtcgctctttgcatttatcccagtatccacgcttatgactttgaatatgacggattctattacgacattacctccgattcaacagtaagtgtcacttacgaaggatccaccgaatatcaatacgaaggcgacattataatccctgaaaaagcaacctttaataacaaaacttaccaagtctcagagattggtccatttgctttttttgagtgtaatatcggaacaatctcgattccaaacaatattattgcaattagagaaagtgccttcacttcatcttcattagactccatcaatataggatcaggagtcttgataatcgagccgtcagcttttagctattgtaacctaggccatatcaatatccccgataatgtcacaagaatagggcatcatgccttttatgcaagttttggtttagaaactgtaataatcggcaatggagttacccaaatagaacaatcaacatttcatttttgtccaaatttaaagcacattgcattaggaaataataccacctcaatcggagcagaagcatttctctcttgcgatagcctaaaatatatagaactgcccaatagtatcagcgaaataggtaaaaatgcatttagtagctgcgatgcattatcatctattacactcagtgaaaatctatcagaaataaaagagcagactttttcaaattgtacaagtctgtcttctattataattcccgacaaagtatcgaccatagcaacatcagcattttcagggtgtaatcatttagtctctctcagattgggtacaggtgttactgatatatcttattgggcatttaaaagcgctccattgaaagaaatctatgctttctcggaaacgccaccgacagtccattatacaaactcatacacaaattcctttgacgcagacatttttaatcaatgcactctgtacgtccctgccggtagtttacaagcctacaaaaatgcagaagtatggaaaaatttcaaaaacatcgtggagaatgatttcacaggaatagaacgcccctcaccagacaaagcaaaaattttcggaaacaaaaatagcattgcatttcgaaatatcgaaccgggtacagatataagtatctatgacacaaccgggaaatgtataaaaacatttgcagtggacggagacagcgaaatccccttccccagcggtatttatctcatcaaatatgccgggaaaaccgtaaaaataatattataatcaaataggctcagtaaaaatcggtgggggtaaacatgaattttagcgaatgcgatggactgcattttccttctcccctgccgtgtcccgtagccttacggagtgttgcgtcagcaatataggagagacaccgaagtaacggcagtttctgaggagaggggttgaaaagatttcaagagtttttgggctgtaagaattaacccctccgtccgacggacacctcccctatattttgtttgacaacaaaacacaggggaggagggcaataccttctgtatcgttagattatataaaagtacaatcccctctgatttcctactgagaagctataaaggagaaatggcactataaataaaaagagatgttcggtaaaacatctctttttatttattccacaagacagttgtactctatttttattcctcgtcttcctcttctttcatattgtggaaaacattttgtacatcttcgtcttcctcaaaacgttcgatcaacttttcgatagaagcgcgttgttcgggtgtaacatctttcacatcgttaggaatacgttcgaattcggcactaacgatttcataaccggcctcttcgagatggtgttggatattattattctccgagaactcgccataaagtacgatttcttcctcatcggcctccacttcatcgacaccatagtcaatcatttcaagttcgagatcctccaccgagactccctctttgggtttgatatgaaacacacatttgtggtcgaacaagaaagaaagactaccggtcgttcccaacgatcctccggctttattgaaataactgcgcacattggcgacagtacgggtcgtgttatcggtagctgtttctacgacgatagcgataccgaaaggaccgtatccttcataaaccacttccttataatcgccggcatctttcgacgaagcttttttaatagcccgttctacattttctttcggcatattcgccgctttggcattctgcatcaatacacgcagacgcggattggcatcgggatcgggtccaccggctttaacggcaatagaaatttctttcccaattttcgtaaatgtacgggccatattaccccaccgtttcaattttctggctttacgatattcaaaagctcttcccataggatatcttttacttatatttttattaaatcgaattatcttagctgtgcctccaatttctgttgaagattggctataattttattcatgatagcatctatctgcttatcgttaagcgtcttattctcgtcttgaagaataaacgaaacggcataggacttcttaccttcggggaggttcttcccttcataaacatcgaaaagatagacctctttgagcaatttacgctcgctttcccgagccactttctcgatatcggcaaaagagaccgcttgatcgaccaacaaagccaaatcccgtttcaccgcttgaaatttaggcaattcgctgtacaataccgcatgtttcgcagccattttcattagtgaatcccaattcaactcggcaaaagaaacctcgacatcgatatcgaaacgtttgagtatcttatgcgagacaagccccatctttcctagtatctttcctccccggttgctataagtcaaagctaccgaataaatctcgtcgcttgtctgtgtcgcgataatatcaccggctattccaagacgggcaaaaatattctccacataagccttcatttcgtaaaccgaagatttctcatcggcatgcgcccagcttccttccactcgattaccggtctgccacaaagcgaaatgtttttcttcggaatagcccgacaaaactttctcttcattatgagtctccgggtcaaaataataacaattaccacattcgtaaaaacgcaagttggcccgacgacgatttatattatgtgaaatactttccaatccaccgaataaaagggtttggcgcattacattcaagtcattgctcaacggattaagcaaagccacgcaatgcgcacgaggccaaccttgcaagtcgtcgtaataagcgccacaggttaatgagttgttcatgatttcattaaacccgcaccccgtgagctgttccgaaactaaattttgaaactggtgactttggtcggtaacagtcttataagaaaggctggaatgtacccggtcggatatttcgacatgattatatccatagatacgaagtagatcttctataacatcgacatctcgctgcacatcgaccctatatgtaggaacttgcaacgaaagttccttttctgtttcagaaacgatctttatttcaagactgttcaatatgctcttgaccgtatcgactggaatatgtttcccgatgagagtatcgattttttcatacgtaagggttacagggaacggagctaccggattgggatatatatccacaacttcaccgcaaatctcacctccggccaattctttcaccaatagagccgcccgtttcaaagcatatagagtatcattgggatcgacaccacgctcgaagcggaaagacgaatcggtattcaatccttgacggcgagctgtcttacgcacccatgtgggattaaagcaagccgactccaagaaaatatcggtcgtatcgttggttacacccgatttcaaaccgccaaacacaccggcgatacacatcgattccttctcattacatatcattaagtcgttagaagtcaacgtacgctctacctcatcgagtgtaacgaatttctcaccctctacggcaggtttcacgatgactttccctccggcaattcgattcaaatcaaaacaatgcagcggttgtccggtagcatggagtatataattggtaatatccaccacattattgatcggacgcaatccgatagcggacaaacgttgcttcaaccaatcgggactttctgccactttcacattccgcatcgtcactccgctgtaccggatacatgcttcatggttcgctacatcgacatcaataccgccctcttttctatcgatagcgaaatcgtttaccgacggtctgtgcaatccggcatctttacccctttgtgtcaaataagcggccaaatcacgggcaacgccataatgcgaagctgcatcgatacgattcggggtaatatccacttcgaggacataatcgctctttatattataatagtctttggccagtgtaccgggctttacctctcccggcaacacgataatgccatcgtgcgaagttcctatacctatttcgtcttcggcacaaatcataccgaaagattccactccgcgaatcttcgattttttaatcgtaaaactttcttcaccactatacaaaacagtacccaacgtagccactaccacgtattgtcccgccgcgacattcgcagctccacacacgatttgaacaggctcggattcccccaaatccacggtagtaatgtgcaaatgatctgagttggggtgatcctcacaagtgagaaccttaccgataaccagcccgttaaggccgcccttgatggtttgcacctcttcaattccaccggtctccaaaccgatagaggtgagagctgccgaaagttcttcgggagaaaggtcaaaattcacgtaatctttcaaccaattatacgaaatattcataacgaactaattttatcttctttctaaaaacgccgaaaaagccttgaaaaagctcttccgaaaattttgccaaagttaataagaaactgtttaaaaagccaagctatcgactaatttaaaaggttctaaaagctatttctcagcagtatttattctatttgtccccgatgttatcgacaagaatcgagccggtatgggagtctcgaaattcatctcacgtcgtgttaccgggtgagcaaagcgtaatttaaccgcatgtagagccacacgtcccaaaggactgccatgcgcaccgtatttgcgatctccgataatactatgaccgagatcgtgcatgtgaacccgtatctgatttttacgtcccgtctccaaatcgagttctaccaacgaaaaacggctgttacctcccaataccttataacgagtaatcgccaactgcccctcatcgggattatcggtcgaataaacttggaaagccgcattttcggtcaaataggaacgaaccattccctcgggttgctccatcacgccctctactactgctacatatttacgttccaatacgatattgtgccaattatgctgcaactgttcctgtattcctttgcttttagcaaacatcatcaaacccgaagtatccctgtcgagacgatgcacgatgaacagcttgttctccgggttctgggatttcacataatcgctgagtatactatatgctgttccggtctttatacgttctgtcgacatcgaaagcaatccataccccttatctatgacaatgatatactcatcttcataaaccatcttcaaacgattgtgtttaaacacactgaaacctcgcttaaaattaattttcaattcgtccccaacatgcaacatcgtgtcgaattgggtaaccggcatatcattgacagcgacttgccggtgagacagataagatttgaccgtcgtgcggcttttgtccccaaacaaagtcaatagataattcaacaatgtatcgtcgtgctctactttgaaacgcttgatatctttttcggaaaaccggcgtaaaggccgtttatcggaaggttggcgcatattatttattttttgtgcaaagatagtgtaaaccaagagcagaaacaaatttatttggaaatgccgaagtatagcttattttcgcattaacacggttctataaaaaacaacggggataggcatgaattttggcgaatgcgatgaattgcgttcctccttctcccctgccgtttcccgtaacattatgaggtgctgcgttagcaatataggagagacaccgaagaaacggcagtttctgaggagaggggttgaaaagattttatagactttttggctgtaagggttaacccctccgtcttgcggacacctcccctatattttgctgtgcaaaacacagtggaggaggtttaattcaatcgcaaagacaacttcacttccctctttttatatgcttcgaaaaagtgtaaatattagtataaaccatgcccattttctaatcgggcaacattcccaatttatcggcgacacccacgacaagtccccacacaaagaaactgacgacaccggcaattaacgcagagaaaaaaccatcgctaatccaaacagaaatcaccgtaacaataatactcaacaatcctccatacaaaatgatataccccatagccttccatatgaaaaccacagccgataaaataaatgccaacaccgaccaaacaaaaccgaaaaatcgagaaaagccatcgcctacccttcgccaaaacgaacgcctcggccggtgaggatatcgcggcctgccctgtgaaatgatttcaccggtcgacatattcacacgagtcccgttacgcaacgtaatgatacgatcgcccatagccccaaaaactatctacactccaagcactcggaatcttttttcaattttactccataccaacggagtatcgtcaaatgtctattcggattccgattgaatggagcccagttggcaaattggaaatcccgacgattggcccaaatataataatcataggtcaactcttctatcagcgaagatatgccgcactcgattccacgagatagctcgttcaatgccaattttaccatcatattgttaatcggtgcgatatcggtcgataatcccacctgaaccatcgcatgagcatcctcgtccgacacatatgccggtataactcccaactctctggcccgacgcacatcggtaatctcgtcattctgatgataaataggattccccgtcaagcaggcataacacggtccacccggtcttacgcgtaatatatcgccaccctcggcgcgagtgacagccctgccaaacaatcccactttacccaatttcaccaaacgggcattgatgttatatctgctcgcatactcgtccgtcgcaactatggtaagatccgattctgccacacatttttcaagaatatcaagctgcttattcatatcgatatcgtaggtctctacttgcgcatacgggtttttcaataatatggcatctttcacggcatttactttgagccgtcccaattcgttcaccccacagatatgacgagcgatattgtgcaattctatacgatcgaaatccatcagtataaaatgccctacaccggctttcgccaactcgacggcaataggtgcgccaccgctgcctaaccctacgataaggacctttttcgactccaacgctcccacttcgagtagccctttactgcgagtataaagctcactcttgcgaggcacatatttcacaaccgcctcgatgattcttccgtcatcgacaataaaagcacgagagctgactttcgtgtcttcgacatgaatgcaaacaataacgaccggaactcgttttgcctcttccggcatcgatgcataaacagacaaagccacatcttcggcctttccataatcgtcagtatcgactacccgaaagagacaaggcatggaatatcctgtcggagccacctgcggatacttgatgtagacatggtaaacctgttcgcctttccactcaaaagcagcgccgaaacattgtgattgcccgctattccaaaaatcctgcaaatgatcctgataaatgtacactatcggttccatagcaccttattctttatcattataataaggtttggttcctattgtcgtgcccactttttcctttccgcttttttccgcttcatcgggagtcatcgcttccagttctccatcgtctccgataaccaattctacttctctacgtccactgttggtttgagccagagcttcacccaaatcttcacaatcgtcagtttgtttttttccaaatagtcccatagttagttatattctttaatagatcaataatttgcccctttcaaaaattcatcgagcgtctttcccgttttcagatgacattcatacatttcgagccaaatgcgaaccttaataataatctgatacaaagttattcgattcggagcccaatcctcataaccgtaatgacaaaccctcacacagccgttttctccggtaagcgtatgcatactgtgactggcttgcagcatactaccgccggaacgcgtcaacaagggtttaggactcgtaataaaaaccttcggtatattatagggataattgtccgaaaggtctattttcaccacgtagcatcgtagagaattagtctgaatggcgaccgccaaatacggatacggcgtgtccatatccataaatttgtactgtttcgattttatcgtcgaattttgcaatacacctaattctatttgatatctgtcataagtcatatcgataaatattttaaactgttaataaccgattgtcccatctctgaaaacgacgaaagccagtgaggtgtaccgttttttcccaatgcccccaagctccaagaagtagtttctcccgcctcataccggacaacgtaaggcgcccgactcggaaaatctttatcgaaaacaatcctccaagaagaccgacgaggtatatcgaatctgatttcaatagtcatgtcatctactttcaacagtttcacagcggaatatttcgactgtatataagagacgatacgcttcaactgcaaacggttttctttattattcaaccaaaaaccggtatcgaacgtcacgccattctccggcggcatctgttgtaccggaatcatattcaactcatgatacacagcctctttgacctgcggcattatcacagaatcccgataagccgtatcataacgactccttaccgaaccgtctccttgcaccacattccacggcactaagttcatctttaccccttcacctgtgcatacaaaagaaaaagcattgacagaggcccctgccctatcgcaaattccaatagccaatatacaccgcgacagcccgtctgccagcataccctcttgtatcgattgcacatcgcctccgctcggatacgacaatcccaaaccatgatgcgaatgccacacaccgatatgggagagatggtactcttcgaataatctatcggcatgcaactgcaaataatcggcatcttgtataaaactggtaaaacgacagaccgaccttctaccgggacccaatacatacatgattacggcatctccgttcggcgtccaatagcccaacaaattacctccggtttccatgtgaggagaatccaatattgtcctcgccatgaaatctaattccccccgataaatatatacgcccccatgagctattcgcccgatatccataatctcttgtttttcatgattacgcaatataaataaaaaatatcgacatttacaaacttataactataaaattaattatgaactggtctataattctcattcactttcccaatcatacaaaaaagagtccttgtttttgtctttccgtaaataactattacctttgttcgctacttctaaatcgagttaaaagatgaaaatgaaaatacaccgagaagggaaaaacatattacttattctttttatcattctggctcttttgaatttgccggtttatctatggataaaaataacatggctggcttatctaatccacgccgcctccattatatttttctttctggtagttaattttttccggtctcccaaacggcatttcaaaggtaatccaaaaaatgccatagtcgcaccggcagacggtgtcgtagtcgttcttgaagaagttctcgaagatgaatactttcatgacaaacgtatgcaagtttctatctttatgaatatattcaacgtacatgccaactggtttcccgttgccggaaaagtaatccatgtaagtcatcaacaaggccgttttatggcagcctatttacctaaatcaagcacagacaacgaaagatccacagtagtcattaaggctgaaaatggtgaggaaatcttagtcagacaaattgccggtgcagtggcgcgtcgcattgtaacttacgccgaagtcggtgatacctgtgacatcgacgaacacatgggctttataaaattcggttcacgcgtagatttgtaccttccgctcgattgcgatattaaagtagctctacacgataaaacaataggcgacctcaccgaaatagcccgtctaaaataaagctctcatgaatgccattacaaaaaatatccctaatagtattacttgtctcaatctcctttcagggtgttttgcctgtcttttcgcatacaaaggagaatacgacatagttgctttatgcatagggttatccgcattattcgactttttagacggtatggcggcacgtttgctccatgcttactctccgatgggaaaagaattggattcactcgccgatcttatcagcttcgggcttgctccgggattcatggccatgcatttcatgctatacgacagtgtctttcatggaataaacgattcctatcaaatctggtgggcattaagcgcattgctcattcctgttttctccgcactccgtttagcgaaattcaatatcgatactcgtcagacaacctcgttcatcgggttgcccgtccctgccaacgctcttttttggataggaatatgtcaagccggcttacaaatagaggacaaagcctgtggatacgctatcgtctgcttagtcattctcttctctttcctattgatttcggagattcccatgttttctctaaaattcaagaacttgaagttaaaagaaaattatcttcgttacttgattttaatcgctgccgcaattttccttatctttttcggactggcaggcctcgccgcaacaataggcttgtatataatattatcgctgttgacagccaagaagcattaacaacaaaaacggaacggtttttgttctaccatacataaacttaacaagtatcaattatgcatgctcttggactgctcctcatcatagcttttattatcttcatagtacccattataggtatatttcaacttatcctccggttcttcttcggaaagaaaaacagcgttaggaatccctttcaacaaggacaacagggacaaaacaacaaagggcgtaccacatggtacacccatacgaaaaagaacaaaaaggttatccaagacgacgaaggagaatatatagattttgaagatataaaagagaaatagataataagtttattatctattttctactttacagataaaatctcttctactataaaattgctatatccacgccagggcaaagctccaagatattcgttatatttcagctccacatgacggccgctcaatcgcatgagagaatctgccaaattggcattatccacagaaaagacaaattgattggactgtaacgttccccggctctcggtgcgaaaaccttccataatgagaattccctcataggttttgaatacatatcctttttttacgacataattcaaagtaccggcttttacccccgatccaaagacaaaataataacgtacataaaaaaaagctcccccaaccaataggagcaatacaatggcaacccgaatgaaacgacggaatgatcgacgcaccttgccagagacttggttactcgattcattttgatttacatgactatccatctcatttatatttttcaaaatttactcaaattatcctacttttcaaaaagtatcttcctatccaattacaaaaacactttgtcgaacaacgaacgcacgccccgttttcacaccagcggaaaacttactggaaggctctcattttccacacaaagataacatttttatatacgacatatacaacaaacaaaaaagccgtcgataccgctttccatatcgacggcttttaacgaatattgtatttaatctttttccggaatattttcaaggactgccaccaacaacttccagaaagtctcgaccgtagaaatcttaactttttcattcggtgagtgagggtgcttaatagtaggaccaaaggaaatcatatccaatcccggataattagctccgataataccacactccaatccggcatgcatcatttttacgtcggcctcttttccggtaacttgcggatatatttttttcatcaggttcaatatatccgatttaaaattaggttcccagccgggatatgcaccatcaaactccactctggctcctgccaaagcaaaagtactctccaattccgatgccaaagccattttcatggtttcactggaactccgcaccaaaatctgtatttcgacaagcccctccgaagtacgcacaatagaaagattggacgatgtttctaccacctctggggcatccggaatcatacgatacacgccattatgacaagcgacaacggcattgataagatcgtcttgtatttcttccggcaaaagagttttcggaagtgaaatctcctcggctttaaaaaccaatccatcttcaataaaaccatactcccgtctcaaagtggagaaaaactcatcgacagcggccatgaaatcggttttatcttctgataaaatagtcaccacagcctctgcttcacgcggtatggcgtttcgcaatgttcctccgttataatgagccaaacgagctccatactccgatacagcctctttcaaaaacctgaacatctccttgttagcattcattcttcccaaatgaatatccacacccgaatgaccgccatgcaatccgcccaaagtcaatttcaaagctatttcaccggcaaccggagtataagcctcctctttgtatttaaattcgacatttacatctacccctccggcacagctcatatacaattcgccatcttgctccgagtcggtattcaataatatttcaccttgcagctcacccggttcaagccctatggctccatacataccggtctcctcgtcgttagtaaacaaagcttcgataggtccatgctgtatctctttcgattcgagaatcgccaaaatcgaagaaatacctataccattatcagctcccaatgtcgtttcggtagcgctcacccattcaccgtcgatacgaggaagaatcggatcggtctcgaaattatggttcaccgatttattcgcctgaggaaccatatccatgtgtccttgaagaataaccggcttgcggttttccatgccgggtgtggcaggtttacgaataatgacattcccggccttatccaaaatggtctccaatcccaaagaacgacctacacccattatatactcggtgattttatcgagatgccccgacggacgaggtacttgacaaatcgcattgaaatatttccatactgcctgcggttgaagagaagtgattttgttgtccatagtgaaaattttatttaccaataatatttttaagggcgatccgactttggaagttcagtcatgacctctgccataatcctttcaccctttggtttctttttgtcacacgccatcgaaataaaggcatatatacctatcagaacgattagtaccatttgagagccatgtgccacaaaagcaaatgcccccgcctcgttaccggttatgccataataggacaatccggcaatcacagcaaaatgccacggcccgattccaccctgtacgggaagcaacatacccaaactacccaatacataaagcagcaagaccgccgagaccgtcaaatcttccataccggggaaagcgaatatgcagacatacagttgcataaaataacagaaccaaataaacagggtatagaatacgaaccaaaatttccctctcatcgtaataatcgaggcaaaaccgtcccagatgttggccataaaattctttatcttcaatacaatcttgctccgactgttcgtatagaaaaaccaaacgacagcgacaatacatacaaagattccaacatagagccacaccgaagtcaatacattcatcacccctgtttcgatagaaggattctcattcaaaaattgacggaacggcttcatttgaatcatgaataccgcaaacgtaagcattgcgagcattatcgtatcggagagacgatcggaaaccatagatcccaatactttcgtaaatgatgccttttctcgctgggccacataaccgcaacgccaaacctctcccaaccggggaaacaacagattcatggcatacgtgccgaaaatagcgtttatcaaaacccgcatcgacggggttatattcaacgctcgcaactgcaaacgccagcgaaacgcacgggcaatatggctgaatgctgcaataaccatagataggataatccaaaaataattcacatctgatttgaggatttgaaaaatggtattcatatccaatttctggtagacataccaaaacaaccacacaccacaaagcagaggaagcagatattttacaatatcccgtattatccttttcaattttcccgttttaaaaatttgttatacttttgtaggttgcaaagataaaggtttatcttcaactttgtagctggcagaggtatgaaaaatctctgtgagaaaaaatttattgactgacaactgaaacgaacccttcatgagctacatagttagacctaaaaaatcgttagggcagcactttctcatcgatttgaatatcgcacaagccattgccgatacgctcgacaattacaaaaatactcccatacttgaagtaggccccggcatgggagtcttaactcaatatcttctatccaaaggacacgatttgacagtcgtcgaactcgaccatgaatcgatcgaatatttacaagaaaatttccccgaattgaaaggacacattttagaagaagattttctaaaactcgatttatcgaagttgttcttcggaaatttctgcgttataggaaactatccctacaatatatccagtcaaatatttttcaaagtactcgaatacaaagatcatataccttgttgcagcggcatgattcaaaaagaagtcgccgaacgaatggcagcccctccgggcagtaaaacttacggtattttgagtgtattgctgcaagcttggtatgaaatagaatatttattcacagtccccgaacacgtattcaatcccccaccgaaagtcaaatcggcagtcatcaaaatgacacgaaaccaagtccggcaattaggttgtaacgaacctctattcaaacgaatcgtaaaaaccgcattcaatcaaagacgaaaaaccatgcggaactcattaaaaagtatggtcggacaagattgtaaaatattggcagaaccgattttcaacgaacgccccgaacggctatcggtcaaacaattcatagatttgacaaatctattggaaagttacattataaaatgaataatctaccggaatatttacgaaaacgacattccggtctcaaagtataaggagggaaaaacatggataaatttacacccgaatatatccaaaatgttcagcaaatcattaaaaacgacgaaaaagacaaagcccgtgaattactgaaagatttgcacccggccgatatagcggaactatatcaacagttgaacctcgatgaagcagagtatatctacatgcttttggacggggaaaaagcggcagatgtacttctcgaactagatgaagacgatcgggaaaaaatgttgaaacaactgccaagcgaagtcatcgccaaacagtttatcgactacatggattccgacgatgccgtggacctcattcgggaaatggacgaagacgctcaggaagagatcctctcccacatcgacgacgtagaacaagccggagacatcgttgacttgttgaaatacgatgaagacaccgccggtggtctcatgggtacagaaatggttgtcgtaaacgaaaattggagtatgcccgaatgcgtcaaacaaatgcggatacaagcagaagagctagggcagctttattatgtctatgtagtggacgatgacgacagattgaaaggagttttccccctaaaaaaaatgattaccaatccctctgcctcaaagataaagcacgtcatgcgtaaagaccctgtatcggtaaagaccgatactcctatcaatgacgtagctatgactttcgaaaaatacgacttggtagccgtaccggtgatagacagcatcggacgtttggtagggcagattacggtcgacgacatcatggacgaagttcgtgaacaatcggaacgtgaatatcaattggcatcgggtttgtcccaagacgtagaatcgaacgacactgttttcactcaaacggcagcccggctaccgtggctgctcatcggtatggtcggagggttggcaaactcggtaatcttaggaaattttgaatcgaacatcgctaaaaatccggccacagcactcttcataccgctgatcggcggtacgggaggaaatgtgggaatacaatcatcggccatcgtagtacaaggtttagcaaacggtaaattagatttaaaaacagcgggaaaacaattattcaaagaattaggtgtagccttgatcaacgcctgcatgatatccctactcgtattcgtttacaactggtttttcctcgacaatatagcgactacggtatccgtatcgctttccttgtttgccgtagtgatttttgcctccattttcgggactctcgtccctttaaccctcgaacgattcaaaatagacccagccatagccacagggccttttatcaccatcaccaatgacattataggtatgctcatttacatgagtatcagctatgcgctctctatataaacccttatttgaataaaatttcactatcaaccgtaaaattctgccagttatttgtatttttgcacttttcgatttaaccgacacaagctcaaaaatgaaaagatacgtattaaatatatccgatttacaagacattgcaccccagttcaaaagcgaaagtggaaccaagattctcaaataccttttcaacctttgcaaaatcaacgagatcaatgctttgtacgatcgctcctgcgattatcggggagcagcattttgcaattctattatagacgatttggacatcacttgccaaatcgaccacgaagagaaactcgataacttacccgaaggtgctttcatcacagtctcgaatcacccgttcggagcgctcgatggcgttattctcattaaactacttgccaatcgccgccccgattacaaagtcatggtcaattggatattgaatcatgtcgaagccatgtccgacaatttcattgccgtagacccttactccaatccagacagacgaaaagtctccctcaatggaataaaagaagctctacttcaagctaaaaacggacatcctctcggctttttccccgccggggctgtctccaaactaagatgggaccttcgcattgaagatagagaatggcaatccagtataatcagattgattcagcaattaaagaaacccgtcgtccccattttctttcatggacataactcgctattttatacgatattaaggatattcagttggaaaatgtgcgccatgcgattacctgccgaagtattcaaaaaagaacacaaaactatacgcatctctgtgggagacgccatttcccccgaaacgttagctcaatatcccaccattaaagaattggagaaattcttaaagcaagaaacctataaattgaaaaaacgataataactataaatttacaaaggaatccgttttagtgatttttacactaaaacggattccttttcttctgtcgtggcaaaatctctacttataaaaaggagctataatcatacggctcccgatttcgccccgttcaaaacctatccgaatttattcctttaccgggataaaagtaaaatcaaactcataggattctaacggcagccaatagacaggcagcacacccggtccgcaagtcgcagttcctaccccagtttgtgcagcatccacatgtactgtcacttcaccgtcaaaattcaggtcattgatatgtgtagcagcttcgatgtttatatccgagtaaggtaatacgctgaactggaacggtttgtcagaaattattttccagccactacccttttctccggttaacgccagccaacgggtatctatgcgattaccggtagactggggcatcacataataatgaaacatagcgaaaggcgaagtctcataaattcctatcttcccggcaaccctatctacatagttctcaaaatcaccccgacctaaataggtcacatcgcaacaattcgccacaggcatacggaatgtcaatcccacccgaggcaatgacttcacgatagctgtatcgggagtaaagacagtatttatctttaacatacccttccgatccaatgtataaacaaagctcccggttcctatctcattgtcttttgcgttgagaacagaaacatcgaccgtaaaaccattcttagagggctttatcgatgtcactttctgggaaattttatccaaccccgctttcttccaaagcatgcctccatgtttgtcttttttgtcattctcggtcaagggtcgatatagcgacagttccaccggttgtgaaagccattcttcacctcgatatttatatgaaatcaatgcacctgtctcaggagaaaccgtagctgatactttatcgttaaaccacgtatatccgtctctttctaattttgtacctgacggtaaatctatttttgcttcatatttggaattggcaagaaggacaaactggtcatatgccacttcataattcgtgtccataaaagccgaggcttgattaggagtccaactaagattcagataggcctccttcacatcacgaggcagtttcactttcccaagaacaatctctaccgtctcgtgcggggcacaagccgttatcacctctccctgagccaatatgttcccgctatcggcggtcacattccaatgcaaagtataatttttcaaatcggtaaagtcataccaattcttgaccgtaaccgtcaaattctcgttatctatcaaacgagatttgatatattgatatacttttttcacagcaaacaaatgaggatgtggttcccggacagcatttaccaacccattacaacaaaaactaccaaaagaagggacaccctcgggaccataatcccctccgtagctccaataccaccgaccgtcggaatctacctctcggaaagattgatccacccaatcccaaatacaaccgccctgagccatcggttctgactcgaaaacgtcccaataatctttcaatccccccacgctgttacccatagcgtgagcatattcacaaagaatgaaggggcgataaatatccggttgtgcaagataagcctttatctcgtctatactacgatacatacggcaataaatatcggtattgaaattttgttctgcccgttcatattgtaccggacggttagtctccaccgatttcagccactcgtaagttttctcaaaattaattccgttgccggcttcattacccaacgaccaaatcgtaaccgaaggattattctttgtccgctcatacatacggcgggtgcggtccatgtgtgcactcaaccacgatgtatccttagccaaagtcgccggaccgtaccccattccatgagattcgatattcgcctcgtctataacataaagaccataccgatcgcacaactgataccaataggaatgattaggataatgggcacaacgcactgtattgatattattttgcttcatcagttgtatatctttcaacatcaactctttactaaccgtacggccctgttctgagaactcgtgtcgattcactccttttaccaacacagggactccattgatacaaaaacgaccattcttaatctcagaggttttaaaacccacgggacaccccgtcgtttctattacttgcccctgctcgtctttcaaatcgacaaccaacgtatagagataaggctgctcggcattccacggtttaacatcaggaataatcgcatcaaacgatacgatactgtctcgcaccggagaaccgccgtcctgtgcgaccattcgatgatcggcatcgaataatccataatgaaccgttatgccgtgtcggcctttcaaaccacctatatgcacgtccaaagagaactccccatctttatacaaatttttatccaatggagaaactactttataatcggcaatatactcttcgggagtgctatacagataaacatcgcgttcgattccactcaatctccacatatcctgacattcgagatacgcccccgcactccaacgataaacttcgacagcgagtgtattctcaccctgtttcaccttattagtaatatcccactcagccggggttttggaatcctgattatatcccaaaagctccccattgagccacacataataaaaagaagtaacaccctcgaaacacaagacgatacgacgtcctatccaagattcaggcaaaacgaatgtacggcgataagaaccgacctcattatcctcatagggaacaaaaggaggatttttcttaaaatgaaacatcggatcgtcaaactcgtatgtctcattcacatatatagggataccataattctggcattcccagttccccggaacctgtatatcattccagccaccggtataaaagtcgggacggtaaaaattcaccggacgcttatcgggattccgtacccaattgaatttccacgtgccgttcaagctcatataataaggagactgttcatagtcttgtgcccgcacgctgtttatatccccctctttatacggccaaacataagcatgaggagccaatttattcaagcctatggcatattggctctgccactccggtgtctctaccctagcgaaagtctttcccaacgggcacaacaacatacaaatcaaaaacaggatattatttttcatcatcttattcttaaaatggatatatttcaacaaattttttccgttatcatttaagcggaagagcaactcgcccgtcttttatttccaataatctcgctgctaattcttcgacgacatcgggatattgttcggctacatttttccgctctcccaagtccttatgcaaattgtacaactggggaagagaactattacctgtttcaataccgacatttttattgaatggctctccttttccgggttctatatacttccattcgccggaagtaatcgataaattattttgtgcattctgttcaaccaaataaggacgcccctcggcttcttttcccaaccacgtatctaaataattctcactatcaggagcagccccctcgggtaaatcggttcccaacaacgaggcaaacgaagcgaaccaatcaatttggcataccaacgcatccgaaacggtcggcttcactgtgtctacccagcgaagaatacaagggactctggtccccgcctcataagaactatatttaccacccctgaaaggccctccgggtttatgttctcccaatagctccacagcctggtctttatatccgtcgtctacaaccgggccgttatcgctcgacaagataataattgtatttttatctaatccgtttttcttcaaagccgataaaatctcacccacactccaatcgaactgcaacaagacatctcctctcggccccatacccgatttcccggcaaagcgttcattaggtacacggggaacatgtgcatcctgcgtggcaaaatagagaaagaaaggttcgtccttatgattctcgataaacgaaacagctttgtttgtaagctcatcggcaatttggtcgtctttccacaacgcagattttccgcccttcatatatccaatacgagaaatgccattgacgatactctggttatgaccatgcgaaggatgcataaccaataaatcaggattctttttccccgtaggttctcccggaaaattctgcttataactgacataaataggatcttccggatcaagatttacaaccgccccattctctacgaatacacaagggactcgatcgcccgtagcggccataatataagaataatcaaatcctatatcggcaggattcggcgacaaccgttgattccagtcttgtgtccctttttcatctccgagccccaaatgccacttaccgacaaccccggtagcatatccggcatctcggaacatatcggccaacgtgtatcgttcgggacggataatcattcccgcatccccatcggcaatacccgtaccttccctacgccatgcatattcgccggtcaacatcgcataacgggaaggtgtgctggtagccgcagcactatgagcattagtaaatctcactccctcggtagccatgcgttgcacgttcggagtatttatcgtcttagatccattacaacttaaatcgccatagcctatatcatcggcatagatgaacacgacattcggacattgcggcatctccacgttccctctcttttcggcttgtcccgaaattgggagtgccattaacggtaatatcaacggtatcgatttcatatctatttttctactaaaataaacatatttttttacactttccctcgaacaggccatttatttacaaccggagaaaaaagtattaattattttaatttacaatcaactcatcgaaatacatccatatcttctgatcttcacgtatatctccgatgggacaaagtccgggattttccatttcgagcttcaaatatcgggcattcaaatccaacccactgaaaacggcatcttccacggctgtacgattcttaaaaatatcctcctgagaaaaagtaatctctcctaccggaacgaatgtttttttattgttcgatacagataaccgaattagcgaaggtttatgaacggccattccagagttagtgatacaccctatacgaacttctttcaccggagtcctttttcccatatccagaacaaacgatgcatcttcgtcataccacccggcccattcgaaatcggtatgacgcaaactgcctctaataccattggtcaacacatatcgtttttcattcgaagccaatacctcttttcccgtagccttgttccactgtaaatccaggagcaaagtctcccccattttctctccgttcatgaaagtcgcggcttttatacaggtcgtactctttaccgtcaagggagaagcgtaaagactcgacgatgcgataggttccgttccatcttcggtatatcggatttctacatcaggcctaatacacgaaagctccaccatcaactttttcccctttggggtaaccttatgatctatattgtacatcgagcgggcacaagtaatatccattgcctcgatatgaggcaaaaccttatcgatccttttcaaaaaatcgggccagtcttttgtccctttttttgcccaagcgatgtcagacaacgccaataaccgagggaataactgatattccacatcatcgggagaattacaaaattctgtccacatagatgcctgtacccccatcaacaagtcctcataaatagggttccattcctcttgaaccggctcataagtatatacgtcttttaatgtattatttccgaaataggtcaaaggctcaaaccactgaggcccctgatagcggataaagtaaagaatcctagcaggtgtcataatgaaccgatgcccttgtgcggcagctttcaacgccgcttttccaaaaccttgccaaccataaataatcgcaccttcgggcaatgtgctgttcgttaattcgtcccagcccatcacttctttacccttgctccttacataattgctcatacgagtcatgaaatagctctgcaactcctcggtatgttctatatgctcggcctccatgcgagcccgacatttcggacacttcgcccaatttaccttcgaggcttcgtctccccccaaatgaatatacttggaaggaaacagttccgacacttcgtcaattacatcttccagaaacgaaaagacactgtcattaccggcacaataaacgatctctgaatttttaccaccgataccgggcaacacaccgataaaacgatctacgaccgggcatgccaattcaggataagcagccaatgaagagttcgtatgagccggcatctctatttcgggaataatctcgatttgccgtaatgcggcaaatcgaataatctctctcatatcgtcctgagtataataccctccgacagagacaggttcgccttcctcttgattcctacgatttggaaaaggctcgtcgcgtttcacccgccaagctcccacttgcgtcaatcgcggatatttttttatctccaatcgccaaccgttatcatcgaccaaatgcaaatgtatcttatttattttcaaaaacgaagctgcatctataatcttcaataaattgtgcttaggcatgaaataccgcgatacatctatcataagcccccgataaccgaaccgaggacgatcgttaacagtcatcacagggattttatactccatcgttctattctgcttcttgccctctaccacacctgccggcaatagttggcgtagcgattgtaaagcataaaagaatccggcatcgcccgcagattctattagaattttttccgaggtaacgatcaaattatatgcctcatcgggcaaagacgtaactgttttcaatcgtacatcggccgtttcggaaccgatcataatgctaggtataaaaccggtctgccgccccaatagagttacaaagtcggataccatacgtaactgagattcattttcaaccccgaacttcatatcggcattgaaatagaaatatccctctcctaccgaatactctgctggaaccggaaccacaggtaaaaaggtatttgcgaccggagctcctatacaaaaagatgcacaaaaccaaaaagagcctaagactaacgcttttcttatcttcatatcaaccattcaccgttttattcattcaccaataggaaattctttcaaaacaggatcgtcatactggacttgcagtcgcttcaactctttcatcaaatcggctgtaacctgctcggttccctcttgtccgaaaatattgtgcatctccatcgggtcgttttgcaaatcatacaactcccacacatctatatcgttatagaaatgtatcaatttatacctatcggtcctaacgccgtaatgacgttttaccgcatgctctgccggatattcatagaagtgataatacagagaagttctccaatcggcaggcgactctccttttagcaacgggagcaacgacacaccctgtatatcggaaggaacagaaacacccgccagttcgaggaatgtcggagcataatctatattctgcaccaattgaggaatgtatcctcgcttatcaaaaccttctggaagacgcataatcaaaggagtacgcattgactcttcatacatgaagcgtttatcgaaccacccatgctctcccatatagaacccttgatccgaagtatatacgacaagcgtattatcaagcaatccttccttttccaagtagtcaagtacctttcccacattgtcgtccaatgacttcaccgtcttagcataatcccgcatataacgttggtatttccaacgtaccaagtcttcacccttcaaatcatctttataaaatttatcgataataggagtataaaatttatcccatacagctttctgggccgaatccatacgcccataaaattgttcgtataacgattttaaaggagtttctttatcagatcgctgcattttcaaatcgtaaatcaaatccatatcctttgcaatactcatttcttgcgaagcggcagccaaacgaccatcataagtatcgaagaaattttcgggataagtaaactccttatcttcatataaattcaaatcgcaagtatcggccatccaattgcggtgtattgctttatgatggataaaaagacagaaaggtttacttctatccctcttgttttgtaaccaatcgagactctcgtctgtgatgatattggtcacatatccccttttattcacggtatcatttgtctgcgtaataaaatcgggattataataatcgccttgacccggcagaatttcccaaaagtcgaatcccgtaggcaatgtttccaaatgccatttcccgacaatagcggtttgataaccagcctgctgcaacagtttcggcatggtctgctgagttccatcaaatttacaggtcgtattatcggtaaacccgtttttatgactgaacttcccggtcaacatacaagcccggctcggcccgctgagcgagttagaaacaaaactgttggtaaacctcactccatctttcgctatgcggtcgagattaggagtctctatataccgtgtatcataacaactcatcatctgagacgtatgatcgtcggtcataatataaacgatattcaatggtttctgtctactctgacaagaaacgagaccacccaatacagcaaaagaggccgccgtgtaaaagaaattaggactgatcgatttcataagcaacggtataatattatataattttatatgacacaatatagcacaggaatacaatttacgacacatcgaatcgtgtacgaaagtattccacaaaacactttgtaaaataatgaatgcccggaaaaaccgagtcattcattatttatacggtatatcaatatccgaagttttggtctgcggccgacaatccgtcgttagcacttaactcggaatgaggaatcggtaaatgcagattctttttcaagaaactctcgtcgctcacttttccatagaacgtcgcatcctccccgaaataacgatctctaaacctttgatccggattgttgtgttgagcctctccttcacaatgctcgtaagttatatcatgacggttcacgatttccaatgccattttcaaagtctccgttccccctcgacgtatatcgaaatacatctcgggctcggcagccaactcaaacaaccgttcataaaatattttcttacgcatttggtctttggacaatccactggggaagtcaaccggttgcgaggcttctggcgaaaccgaagtacgcgcccttctcaaaacctcatttaccagattggccgctctatccgtttcatctaattcgttatacacatcggccattagcaacaaaaagtcggcataacggtacaatatgatattgttgttgctctgttgcgcttgacaattaaaatcgatctgttttttccacaaaggccacccggcatgatcacccaccgacgtcgcaaactgtcccaccaaattgacaacgttcttttcgccggtcgtcgtattctcggtgtaaaactgttcctgcaaaaccgtcaattcctctacggtagggttagtaggatcgtccatttggtcatacgggatataagcaacagcatctgctacgcggctcgtcgatttggtcttatacgtcttatatggataagtatataccgaatcacttatcaagtgataagaactgccgtttttcacatcgtaccaccgagtcaaaaacgtagcatcataccgaggatcccccggataagttccacggaacagatcgtgaaatgctttggtcgaacggatacgctgataagccgtacccggcgatgcattgtcggcagcaaaaatccaattcaatctattccaagaataatccgacgaagtagtaaaattcaactggaagatagattccggcgaattctgcacatggtttacaaaaagatcggaataacggctctgcaatgaatactttccataaaccaaatcgcaccagaatttagcatcttctaaataatcggctttgcggtcggccaaatcgggattacacgaaagcatccaattcagtttggccaaataagcggcaactcccaacttatcgatatatccgtcaacgtgttcgccattctccggcaaattgtcatacgcatacttccaatcgatgaaaatctggccgacaacatcgataaaagacgatttcggttccgaaatcgcatcatgggccgacggttcgatccgcaaaggaacatcaccccacatcatagaaagatagtaataacacaacccacgaataaacgaagcctgcgccgtgtagttttctttcagatcttcactcaacgaacccttattcatattcacgatgaaagtattacattcttggatagctttgtacaatcctcgccaagcccacagcacggcatcgccggccgtagtggcattcaacgaagcgtaacggtccggttccgaaccatttgtctgcgaccacgagagccccgatgaccccactgacatttcataaacaccctgtccgaaacagtcttgtgtcgtcaaatagccataacaagcatccaaagcctgcttagcagtctcttccgaatcgaatataacggtattatccacagagtacttgggattctcgtcgagccagtcttcacaagaagagaaagtaacacccgtcactattcccaagacaattatatattttagcgatttcataaattactatatattaaaatgaaacattcaaaccaaatataaacgaccgagcatgagggaacgaactcatatccactcccggacgtaaaccatcgaatgcaaaagagttaacctctggatcgtaaccactgtaatcggttataataaaagcatttttaaccgatccgaaaatattgatcgaattaaacccgatctttttcattaccgccttcggtaaattatacgaaagggtaatatcggtacaacgcaagaaactggcatcctctacatagcgatccaatacagccggtgtaggcaatgtataatttactctcggataagcgttcgaacggttttcggcagtccacgcgcctacccaagcctcggttcgcaagttgccacccgtacggttcgggattgcttgataacgaatattggtattgatcatatccttcccgtgcactccattaaattgagccgaaagactcagaccgcgccaagtaaaacgagtttgaaaaccgtaggtaaaatcgggattcgggttaccgataatcacacggtcatcggtattgatcacaccgtctccgttctggtctatgattttaatatcaccagcctgaggcgctccacccgtacttaaatcttgcgttacattatacgaaccgccattggccggcaaatcttcttcctgaacgattccatcggtttgataacccaagaatagccccggctcatgtcctacccagaacaagtgtgcattcccgaagtggttacccaacgagtttccttcataagccaatatattctcatacacaccgaaattacctctcgaaacacccagactattgatcttcgggttattttttccgatatttcccccgaacgtccatgtaaagtctttcgtttggataatatcggcttcgagactgaactcgatacctcggttcaacaaattccccgaattataataaatgctcgggaaaccggccgaaggaggcaatactctggaaatgagcaggtctctcgtctctttattataaaagtcgaacgaacctctcaacctgtttttcaataccccgaaatccacaccgacattccacgactcggtcgtttcccaagtcaaaccctcgttctgtaatttatcgacagccatagcgagaaccttgtcacccacagcattagcatagtctataatttgactataattcgagaaactactatacggatcgatagccgagtttccggtctgtccatatcccactctcaccttaaactggtcgagccaatgcacattatcctttataaaatcttcctgttccatacgccatgccaatgaaaaagaagggaaatatgcccaacgatgtccacgggcgaaacgactcgaaccatcggcacgaaacgatgccgtcgccagataacgaccttcgaggaacgacatgttcacgcgtcccagataagagagtaactgatagtctctttgtacgggttcgaggtaagatatgcgttcggccatgtgcaatccgtctataccgaaactcatattggagaactgacggccctgtgttctcttattcagataattgtaatcgtcataagtaacagccccggttacatctaaatcgagaatacggtcgaacgtatgatgataattcaacatattctcgacagtgatattgttttggctcaaatcggtgatacccaaagaacctttatcgttattcccccggaaagtctccgtgccgaaccaacgggcacgatattcgtccctcaaattgccacctgcacgaagattatatgtgaggcctttccatattttccacttcaagtccatcgaagcacgaaaggcgttctcagtcgtttggtcgtcataatcattcaaccaactgaatacagtgatcctcttctccataccgttcgtaccactcaacgaagggtcgtcggcgggatactcaaacggttgggaagtaatagcggttaccgataccgatccttgtgctccaccgttggcattgctacccgacatcatatcgttctttttcaacgacccgcttaacgacaaatccaccgatacggtcttcgacaagtccatcgacaaattcgcacgtaagtccccctgttgtaaaccagtctgttttacaataccgttgatatctttgaaagaagccgacacaaaataacgtaccttgtcggaaccaccgttcaccgagaccgaataattctgtgagaaagccgtacgataaatctcacgctgccaatcccgttcctgcaatatgcgatacgaagtagggtcggtctcatcgtattttccacccgagaaaatataacgcacctcgttccccgatttgaagaactggcgatcgtcgggaccagactgagcattccggtaatcggcataatcgctcaaattcaacatatcgtacaatcgagtggcattcgcaacagtaaagttagcattcacgtttatgcgaggtttaccgctctttccttttttagtcgtaatcaatatgacaccattagcacccctcgacccatatatcgccgtggccgaggcatctttcaaaatttcaatactctctatatccgcaggattcaaactgctcaacggatcggccgcggtttgataatcgtcatcgccgaatgcggaagcggcgaactctcccgtagaggcctgaggaatattatcgattacatataacggttggttatcgccacgtaacgaactggctccacgaatcgttatagaggtagcggctcccggagtcgtgttggtagcccctaccaccaaaccggcaactttaccttgtaacaagttatcgagagtcacgctcttcgaagcgtccatctcatcgggacgtatcgatgcgatagctcccgtcacatcgcttttcttgacactaccgtaacccactacgaccacctcgtccagcaactgggcatcgccttgcagaaccacattgacaacggtcttatcacctaccttaacttcttgtttctgataacccacgtaagaaaacacgagtacagcattcttatccggtacagaaatcgtataatttccgtccaaatcggttgccacagcttttgtcgtacctttcgcctgtacagtaacgcccatcaatggttcaacatcgtcacggacattaccctgaacggttatactttgtgcgtatgcaatttgcatgcccgacagcatgacaattacaacagacaaagcctgtctaatcatatcctttattttcatgtaattatattttaagatacttatttaatcctgaacttaaaaacatctactccttccgacgacctcacccgagcgatatacacacccggagaaaaacgatcggtcgatatggtatattgctttcccgaaattctttcgtcccgaaaaaggacacccgaagccgagaaaaaagcgatctgcgataaatcggcatccgatgtcgaaagcactactatttcccccgaccggtcattacaaatgagattggtctttttttttccctctttcgataaaaccggcagtgaagacaccccgtctgtccgaatgattagtgtatctacattggccgaaataaccgagttcgcagcacgaatcaaactcaacgggtcggaaactgccacatcgttccccatgtcaaaatacatgaccgtaccgctattctgttcgagaatgaagttcatcttgtcctttacgcaatcgacaccattaaaagtataagaggaccccgacatagtcgccgtattcgcatcggtagacaaatcgggattggcagctacaatatttttatatcctgtaacgttgcttcctgtcgtcgccgtagtaggataagacatacctattttttctttcggaaatccccacgacacaaacttattatacgccgaaacataattgtcatacgcaaaccaagtcacctgaggcccataaatctggaaggtataataatcgggcatatcgatccacttcgtaggcagaaaataagctaccggatgcaacgaaacactgaacactttatcctcgggaataacagcacgcaaagcctctaccatcgggccatatcccgaagtccacctcgaatcgccgctatacaaccactcgaaatcgacatctataccgtcgcaataaggcagcaactcggcgacgtccgcagccaatcgttcgcgccatgcagcatccgaaatatgcgaaggccacaccttgttcccgttctcactgtcggaagagatcaaacccaaacgtatcttgaagcccctgtaaccatcatacattttcctaatctgcgacaacagttctttccagctccgagtgtttttcccggggctatccgcatcattgaattgccaatacgacaacaaataaatagctccgtcgccaccgctgggaaaagtgaggtcgccagacgttccggcggcatcctgtgctatctgggcacttgtccgggcatttccccaaaccgctacttcgtcgatgtatcctttgaaattctccccaataacggcatcggccgaagtattcataaatgtaaaatcgtcttcgtcgggtatcgtcgtaatgtcatcggcataagtttgacttgctccgctatcggtaaacagccgaatacgggatatagcccgaccggtcgtcgaaacgatagacacggcaatatgttcccaacctgcggcagtgagcgcattctcaaaattatacgtataaccgttgattcctaccaacaattccttcttcgactcatcgcccaattttatggaaaactgattggattcatcgctcttattaaaaatcgctgcccccgttcgccattcttcaatagaaatccaagcctcgatagtagcgtaattcattgctggaagcccgccggtattctgcaaaacttcttcactcacattcatgccggcgccttcgccattcaaatgaagaactccgtttcgcccttcatattcggccacatacgaagcattggacagcacaccttgattatcggggtaagtcatcgtcactgctccggtatagcccgacacttgtgcatcgagaaatatcaaatcattagtcatcaaatgcatatccctatctatctgcaaacggtcacaatgacgcacgaaagaagaataacccgttaccactctatatttaaagtaatcgttatcgataacggcttcacgcgtcacattcgtgggttcgccatgatgtgccaatttatagtccacaatatcttcgcactggtcttggtcaaacttgtaatagaacagaagatcgtcatatttcgggtggaatttgttcaccgtattacggaacatcaggttctcgggttcagctcccggcatctccgttttccagaaacggaattcgtcgatacgtcctttaaagttttctcctatgacaaatggctccgatgtctcaggaataactgctccaccggtattggcaatccactttttctcaccattagtccacacatcgattccattggcaaatgccgaaatggtaagttgcgtccacgaacctatcggcaaatcgttcgctacgataaattcttgtgtcgctgttttataaatcaactgccccgaggttccgaaccgtaaagaacattcttcgtctccgtttcctcgtttaaaaacataagcattttccacccattcggacggattcaccaaacactgaaccgaataaagatccaaattatttaagtccgatatagttccgcaatcgacttttccgtcaccattgaaacgtaacgcaaaatttgtagtctgtgaaaacagcgaaccataaaaaaacgaactgaaaagaataagcaaaagaatcctcgttttcatgcatattttatttaagagtataacaaaacaaagaaaaataaagccgaggaaatttatcctcggttttataggtctcatttataagtcattaaagcacgactttcgatgctttgtttccatatttcaccacataagcaccgcgagacatcggaacttccacgaacgaatcggttaccttcacggttttcaccaatgcaccgttcaacgaatagataaatacctcggtcccgaagtctatatcgttcaaatagatatactgactatcccatgccacgaatccgttggtttcacctatcgcgtcaataccagtagcaggtgatccattcggggtatcccaaccatcgaaattcacaggatcgaactcaggacattctccgctcggattagccgtaaattgtatcgttgcgatataaatggctcgattgcccaagtgtcctccgggaatattgtaccgtatccgcaaaggaatcctatcgtcgcctgtaattccggcaatattcaaatcggcatatatcggccaccatttcgtatcgatcgaactgtaagtagtagtttcggggagtggtacattggtcgttgcccctccgaaattccaaacagaaatcttataatccgcagttataggatctcctactactttcgacacgaaatggaaacgtaccggagtattaaccgggaaatctatttgtgtaaacatactgacgtttatatacccggccaaagcatcagcggctgacaatgtgggttcttcggcactaccgtccccttttatcaacaacatatttccataatccgaagcaacgatgtgacaccctttattaaagccggccacactggcatcttcatttttaacttgacctccggtcaacacgacagtaccctcctctttcaacttctcggtaggataaggtgaaacaggattggctccctgcgaagaataatgaacaaattcatacgaaccgaccgtttgatcggcaaatttcaaatgaccgggagtaacatcttcatcggcagcccatgaataattagcacccagcaaacataaagtcgaaataagtaatgctttcgttttcatacatacaagaattaagaaattaaacaataaaataatttgctttcacgaatgcaaatataaaatcacccccaacaaaggcatgttcgaaattgtctaaatcattttcgaaatcgtctaaaacaagtataacaggctattgagaaaaaacaaaacgtttgaaattaagccgatggctcgttccttttctgctctcggtactcccgaggagtcatcgatgtaaattgcttgaagcaggtgctgaaataacgagcattggaaaacccgatacgctccgatacctctgcgatcgggatatcggtatcggtaagcaatctcatggcttgttcgattcttatgcgattgattaaatcgttcacgcctaaacctgtcaatgccttcactttgttatacaaagaagctctgctcatgcccatttcgaccgttaaatacttcacatctaaatcggagttatctatattatccaacaccagcttattcaatttcaacaaaaattgttcgtcagcattactgaatgtctggtttttaggcatgatagaaacctgtacggcatcgcgataatagttttttatttgttccctattccataacaaattgcgtataactgtcaagagcacatcgtcatcgaatggcttggcaagataaaagtctgcgcccaatttatatccggctgcgaggctatcggggttatcccttgcagtgagcaagataaccgggatatgactgatttgaatatcgctcttcaacaaacgacaaaattcgaatccgtccatgtggggcatcataatatcgcaaatcaccaaatcgggttggcactgatgaacgacatgcaaaccgttcactccgtcatcggccgtataaatttgtttaaaaacactggaaaatgaagttttaataaaagaacgtatatccatctcgtcatcgataatgagaatagaataatcttggagaggaaaatctttttcgggaacggttgtctccggcatatcggttgcatatcctatatcgttcaaatacatacccggagcacatgcgacatcttcgtcgttatatgccaacggtaactcaaaccaaaacgtggctcctttgtcttcgttattgtatgcgcctatttccccgccatgcaataccagcagagtcttagaataagacagacctataccgctgccgctcaaccgatgatctccctgatagaaccgagtgaataaatgggataggtcattctcgttcaatcctattccgtgatccttgacagaaatgcgcacacaactttctctacgttcggtgatgaccgttaccacagttccttcctcactgaatttaaatgcattcatcaacaggttggacaatacgatctcgcatttctctctatcgaaagagattttatctatcgtctcatcgggattgaaaagaagcattattttcttggactcgaactcttccgaaaaatccccgatgacagcccttacccactcattcaatgaataaggagccaaatgcaatgcttcatatcccacctccatacgccgcatatcaagtaccatattgatgatattgcgcatacgacgggcctgtttgaaaatctgcattaactgtgttttcagcgtatcatcgacagtgccgctctttaaaagtcgctttaacggagcataaatcaaagttaaaggtgttcgaagttcatgactaacgttgatcaagaaccttaccttatcttcatacactttacgttccctctctttcatttcgagctgcaaccgggaattttttctttttacagtgtaacttatcatcaaatagcacaaaccggccgctacaatcaccacgagagcgataaaccaaaacgatttccaccacggtggaacaacctctatctgtaatatgcaccgggattggctccaaccgccgtcttccgtactacacgaagccattaccctatatgtacctgccggcaaagtatataaagtcagagtatggtcgtaagtttctatttccgatcgaccgaggccttcgatgttgaaccggaacatcttcttcctgaaaatatccttctcccgtaccatcgtcttcaaagtgagcgaagtataattccatgcaacacgcaagctccggtctgtatcgcccattttgttcatcaccgattttccatcgagaacaacatcagacaactcgaccgacgaaggagagagggaattgtactccttgtatatttcccgatcgatatgtaaaagtccggttacaccgcccatataaatgtgagctccgtcccgagttaccaaagtagatttatgcaaatattcgttaggtatagcgccgtcggattcgccgtaaataaaaaatttatcctcgcctatggaatatcggaaaagcagaccgtcggcgcctaaccacagatattgattggcataggcaaccgaagtcacctccctaaacatattcgtttttatttcgttcaacgcttgggtattcacatcgtagtggaacagccctttgtcggtccctatccaaaagtttccttcgtcgtccctacaagccgcattgatgaccgcttttgaaccgaaagcaaagagacacaccgcagcattcttcgcatggtcgagccgcaagatataattgcggccaaaaagataggtaatatccttatcggaataaaaccgctgaaccgtaccgtaataccgagacgaatcggcaacatgcgcaatggtaaaagagcccgtcgatttatcataagtatatatcttgtccgcaaataaatggattttatcggtatcgaaataatcgacattgaccgatatgcccgaatgtataatctcctcgttacgcctatcgttcaataaagtaaaaggccttaaattacccgtacgtttatcgaacaaatataaccctttggaaaaaaaatacatcaataattctcgctcgttataacgggttatcgaggcaactttatatccgtaagtattgggatagtgggtaaatctattgctctttggctccaaacggttcagtcccccgccatcggtcccgacccagataattccgtcctcatcttcatataagcacaacgccgttttatcgctcatgccgtaatgattgcccggagaaacatcgcgatacgttctcatatgtacctctttgatgccgaataatccacctcgtatcgttccagcccacatattgtcgtccctgtccttatataaacaaaataccgaactatacggaaatgaatagatattgccgggcgtatatcgaatattggaaaaagtctcgtctttcaagttcaggatactgattccaccgccatcggtagccagccataaagaaccgtcccgctcttctatatcgagaatcacattattggttagatctgagttcgacacatcgtaatgcttttgttttctaccgccgtcgatataccggtcgagccccttgccatagggagaaatccacaaatctccctgggtatcgactttgaccgacatgatctctttctccttacagaacgtcggtcgttctatttcccctgtacggcagtccaatagccacaatccgttccatctcgacgataatacccagcaatgctccgaccacggtatcatgtgattgaaaaacgcgtatgacttatctttccaccgaacaggaaccgtatccatgacagcccggtgataatcccatcggtatattactccccttcctcccaaaaaaagagcatcgtcagtcaacaaataagaatgagcctgcaaagccttctgcctccaaagaacagtcttgaaatcgtcgctttcccgctgataaacacatacacccttatcggtcgaaatccaaatattatgacgggcatcctcaacaatgaaatgaactaaattgcccggtaaagaagcggctgaatcgggaacagacgaataattcttaaactcgtgataatcgaaacgacttatccccgacttcgtcccaacccacagaaaaccatcgtggtcgagcatgatagaacgcacaaaattttgagaaagcccatcttgttgggataattgtttgaaataaaaattgggagccgcttcgacaataactgtctcacacgctataatacctgcgattaataagagataaatataaagcaagcgtcttctcatacaaaacaaaaattcaaaaataaaatacggcgacagcgagtttcctcaatggttttattatcccgattccgatatcctaaatatctcttcccggtgtcggttagattaacctctgtaatctaaataactagccatatacaaatatattcctctctctaaatttcacaaacgatttcatagaatgatatcaatcaaaaacaaaattatgaaaatcttgatgtctttcgatatattttcacgagaatttccataccatattcggaataatgaattttaaagtaaaaagaaattctatcctattcccaaagtaataaaagaattacaattctcttaaaaagttcaaataagtctcgataccgataaaatctcgccgataaatcacattatcgctttgcccgacaaatagaaaaatatgtatctttgcataaaatgcagaaatagcatcggttcagtttggaaaacgaatctattcatttcgttctgcatttacttttcgctatgtttgtaaatacatttttattagaaaacagatgattccggcagaaatacagcaaaccaaacaacgattcggcattataggaaatgctccgggtctgattcgagccattacaagagctctacaaatcgcacctatcgatttggctgtgcttattaccggagaaagcggtgcgggaaaagagttctttccacagattatacatgccaacagttcccgaaagcatggaaaatatattgccgtaaactgcggagcgatacccgaaggaaccatagattccgaattgttcgggcatgaaaaaggagcttttactggcgcattatctgcacgaaaaggttatttcgaagaagccgacggaggaacaattttcttagacgaagtcggcgaattacccctcacgactcaggctcgattattgcgcgtactcgaaagcggagaatttctaaaagtcggttcttccactgttttgaaaaccaatgtaagaatcgtcgctgcgaccaacttggacatggtaaaagccgtttcggaaggaaaattcagggaagatttgtattacaggctcagcacgatacacatcgaaattcccccattgagagaacggtctgaggatattctcctattattccgtaaattttctacggactttgctgagcgttaccgaatgcccgtaatccaactgacggaagatgcacgcaccgtactgctcaactaccgttggccgggaaatgtaaggcagctaaaaaatatcaccgaacaaatctctattttcgaaacgaaccgagacgtagacggagcaacgttgcaaaactatctgccccaatataatatcgaaaaattaccggctcgcgctacctcgaacgaacaagagcactccttcttcgagaaagaaagaaaaatgctctacaagacgctgttcgaaatgcaaaaagagctggcagacttacatacgaaagtagaagaactgacgagggagaaaattcagggacaaactccttacgctcaaacgccccaaccggttcctgtcgcacaatcgatggctcttactcctatcgtaccatctgttccggtacatgtcccgtccgccaaacgaacggccatagaagacaccgtaggagaaataatacccaacgaacccgaatatatcgaggaacaacctacgacactcgaagatacggaaaaagagaccatcaaaaaggcattattacgtaatcacggaaaacggaaaaaaacagccgaagaattaaaaatatccgaaaggactctttatcgtaaaattaaagaatataacttagaatagagccgcacgacaatgaaacgtttaacgactatattactcgtcatactgtcgtcatgcagtatctcttataaattcaacggagcttcgatcaattacgaaacgaccaagaccatatcggtagcaaactttcccattaaagcggcattggtttaccctccattggaagagttgttcaccaattcattgaaaaatgcttatactcggcaaacacgattacaaatggttagcagcggaggagacctgcaattggaaggagaaatcacgaactatgacctcaccccgcaagccgtaacagaaaacgcatacgcatcgcaaacgcgcctgactatttctgtaagggtaagattcaccaacaccaaagaccctcagtatgacatagaccaaacattctccgggtataaggacttttccagcgaccgaatgttaaccgatgtgcaagatgaacttatccaacaaatcacagacgagctggtagatcaaattttcaacgcgacggtagccaactggtaacactatgataacccgggaacaaatacgaaaccttctaaacgggattggcgatgaaacaatctcgaaatccgatgccgaccaaatggccgcggattatccctatttcagtatcccgcaacttctctatctgaaattcacaccgggagccatgcccgacgagaagcgcatacaacaggctctgatttacgccagtcctcatgcgcacttagagaccattctcggagtcgaaggagaatctttcgccgacctctatccgaaagctccccgaaccgacagcaccatgcaagcgatcgatctgtttttgggaacataccgtaaagagcaaaaacgaggtaatgaagaagaaagcctcgaccgaattatttcaggcaatatactcgctcaatcggactatataagcaacctgcaaaaagaagaacaggccaatttagccacaacgccggttcacgagcacgagacaaatccatctcctgccgttctaccgaaaacaaccggtcgcgatcaagagaatacagaacaatccgcctcctccgaaagcagcaacgacgacactttcttcacggaaagtttagcaaaaatctatatcaaacaaagacgatatgagaaagcattgcaaataattaaaaaattaagtttgaaatatccagaaaaaaatatttactttgcagaccaaataagatttttggaaaaattgattattaacataaaaacagaataataaaaaatgtcagtagtattaaccgtttttatcatcttggcatcattgctgatgataggtattgtattggttcagaaatcaaaaggaggaggtcttgcttctaacttcgcatcatcgaatcaaatcatgggagttcggaaaacaaccgactttgtggaaaaagcgacatggactcttgctattgttatcatggttctgagcatagctaccgtattcgtttctcacaacgggcagcaatcttccgtatcggaaattaaagacattgtaaataccgaagcaccggcagctcttcccggatttgaaacgcctgctaccggaaataatgcaacaccgacacaagaggctcctgttcaagaagctcctgcaaactaaaatatgaaaagacttttataaattttcatatatcaagcccgaacgtaatgtgttcgggcatttttttacaaatcgaaattttacttttaccatggacgacacaaaaccattctggcatcttttccgacataaccgaaacgatgaaaaaccttcggagatagaaaccgaagcaaagctcaaagagcaaatacaggcacttgttcgtaacggaatctttttcgactttgaaaaaagaaaagcagcccccgtacaatctaaattcgggggaaaaccggccttaccgaaaaaattcgaatggcctcactacaccgatgaatacggcgaacacatcgttcttccgtttttcctgcaactatcttgcgaagaactatcggtttacgacacagacaatctccttccacacgaaggcatgttctatctcttttatgatctcacgaatcaaccgtggagaaatagtaagggagcaaaactattatacacccctacccccatttccgaattagtaccgaccgatttccccgacaatctcccggaagaacacaggcttcccgaaatggcgctcaaattcacagcacatacttgtgctcccgattgggaagattatgtcggtatgacaggcgatgacaacaccgcatataccgattgggatatcatagaacgaaaattagggaaatggggatatccccacatggaatcggccggacgtatcttgggatacgcctcactcattcaaaacggtatagccgaagcatgcgaatcgagagcgcaagaggagaaacaacagacatatagcaaaaagtctgcccgcgaatggattttacttctgcaactcaactgtatcgaggaagaagaggtagatataccgttcggggactgcggaagcctttacttttatatccggcaacgagacttggaaaggcgagatttcagtcaaattcaattcgagctgcaatgctattagaaaattcggctcagtagaaaatcggtgggatagacatgaattttagcgatgtcatgccgacaagcacattccggttccctcggcgagtggttaaacaagcagccgaatagatttttgacaaaaatcaacccctcctttactactcgacacccgccctatatcttacttgacaacaaacaccctgtaaggctatgaggctcagcaaggaggagggtgaaatccacttcgaacatttttaagctcctccattgccgtgccccgtaacattacagggtggcacgtataaaatcggaatagaagcgaaagagaaatacatctcaccctcctcctctgtgttttgcgcagcaaaatataggggaggtggcacgtagtgacggaggggttaaaaaacagcgacagtaacagcaacaaaatcaaatctcaaccattccccctacctggcttcgccacatagggagaagattaaaaatgatatttctcatttctgcataaggatagattttaaacttctcccctgtgttgcgccagcaatataggggagacaccgaagaaacaatagtttctgaggagaggggttaaaagattggatagcacaatcccctctgatttcctactgtgccgaaaactccaatctatcttaacccgacattataaaaagaaaaagagccgaaaaaattcggctctttttcttttaggctacccaatatatttattttacaggtttcaaggcctccattatagcggcttccaattcatcggccaattcggggttatcctctatacatttcttggcggcatcacgaccttgcccaagtttagtatccccgtaactgaaccaagagccgctcttcttgataatacctttatcgactcccaaatcgataatctctcctgcacgggaaatcccttcgccaaacatgatgtcaaactcggctttgcggaaaggtggtgcgactttattcttcaccactttcacacgagtctggttaccgataacctcatcaccatcttttaactgactgacccgacgtatatcgagacgcacggaagcatagaatttcaaggcattacctcccgtcgtcgtttcgggatttccaaacatgaccccgattttatcgcgcaactggttgataaaaatacaggtcgtgtttgtcttgctgatcgtcgccgtgagtttacgcaacgcctgtgacatcaaccgggcttgcaaacccattttcgagtcacccatatctccttccaactcagccttaggagttaaagcggcaaccgagtcgataacgactatatcgacagccgatgaacgaatcaactggtctgcaatctccaacgcctgctctccactgtcgggctgcgaaatccacagattctccacatcgacacccaacttttcggcataaaagcgatcgaacgcatgctcggcatcgataatagccgcaataccacccgctttttgagcctctgcaatggcatgtatggccaaagtcgttttaccagacgactccggtccataaatctcgatgacacggcctctcggataacctcctactcccaacgccgcattcaaagcgatggaaccagtgggtatcacagcgacttcctctaccgagtcatctcccagtttcataatagcacctcggccataactcttttctatcttgtccatggccgcttgtaaagcctttaatttctcagacgaaaccggcactcgtttgccggcagtttcttgttgttcttccataacgatatatttttatttatttttcaaaatttgtgaagcatgattctttgtatccaccttttctataatatcggtgatcacaccgttctcatctattataaaagtagtccgcaccgttcccatataagtacgaccggccatctttttctcccgccacacaccgaaggcctcgttcaatttacactcggtatcggctataagagaaaacggcaaagactgcttctcgataaacttgcgatgagatgcctcgccgtccttgctcacgcctatcacggcatagcccgatgcttgtaattcggcgtaatgatcccgcaagctgcatgcttcggcagtacacccgggcgtattgtctttcggataaaaataaagtatcaatttacttccggcaaaatcacttagccgaatctccttaccagtctgatctacacccaatatctcgggcgctttatctcctcgtttcaatgccatactatattctattagtttacaaaaatagtgtacaagaaaacagcgacaaaaccgtcctatctataccgcacacacttgcctttgttcattacacaaatataccactttttctctctccttccatcaaaaccaaatagacaattacctattttttctctgacgaaggcatgaaaatcggccgtgtcccgttataatccggtaaactcatttccattctctttccgctctatctttaagcgatacaaatatagaaccggacataagcagattatatacacataaaagttaatatatactaacaaataaatccatcaatcgaaatgattaactcacaatttaacaaatcctctataaccatttggtcaataaaatattcccctatttcaaaaatattgttatatttgcatgtgatgataaaaaatattgcctatgattatataaagaatccgatacatacactataaaaacatattgaaaaaagcgttttagctatattcttcctatctaaaagtttggcgacttaaaaggcaaagaaggataataggtgaaatgctcacgtgtagcgtgggctttttgtattatcttgtttgcctaggtttcgccaaacaccttagatagcaagatatgttaaaaagtgccacgctttttttgtgtacgtatctaacccacgatttctggcactcaaacaacggagtattccgaaaggccgataataaaaacgagtaggaatttttacattttactattatgaaaaatttatttttaattctgtttctaatactaggaataggtataacttatgcaggaaaaaattataaagttaccgttacatacgaaataatatatgaatattacgatgatagtaacggtagttacatgggagaaaaaccagcaggcacaagtagtaataaattctccttttatgccgaaacgccccatgaagccgaggaaaaggctataagtcaatgctcatcgacatgttcttcttctggaacatatcaaggtccgggagaatacaagggtaaaaaatgcaaagtatatcaaaaaagaagggttatttctgcaagagcacaataataaaaaagcgagtatgaaagttaaaaatttcagatcaaattcaacaatgacattcttgttcattgttaccacaacattattgttttcatcatgcgcctcattcatcagcacaatggaatcgaccgattggaaaaaaacgaccaacgataacatcgagttactgaatgatgccatgcaaacagggtctaacaaagataagtaaatagcataatcttattaaacccataagacagatgtaatagaggactcatttatatcctctattacatcataaaaaacagaaaaaaattattctttaactcagtaaaaaaattccaagctaaattcgacaaaatcttataccaaatcaagcctgctttttatacgtcaatgccgccatactattgaacaaaacggcaaagacggctaatgccacgtaattaggccataattcgataaacatcgttcctttcagataaaccgaacgcatcacctcgacaaaataacgaggcggcaaaatgtatgtaatccattgcgcccatgtcggcatagattctatcggagtgaacaatccgctcatcaaaataaaaatcatcacgaaaaagaacatgacaaacatggtctgctgcatggtcgacgagttattagcgattgtcacccccatacccgacatcgtaaacacaaaaagcaaagccgccagataaatggagccgggagaaccttcgggcgaaagcccgtaaaccaaccatgccaacaccatagcgacggtcaatacaagaaaaccgataatccaatagggtatcaacttagccaatgtaaacgataaacgactaaccggagtaacattgatttgctcgatagtacctatttctttctcgcttacgagattcaaagccggtaaaaaaccgcaaatcattaccagcaacataatcatcaatgccggtatcatgaaatgtttataatcgagagtaggattataccgattctgcaccgtaaacaaatcgggagatacaacgaccgatttctcttgctgtaattcgccgaaagtctgcatgacgagctgtaccatatactgtgagccaagtccccctttcatagcgtttataccattcacgtctatccctatccgcttgggcgaatcaccaattaacgaaagttcgaaatcgttcgggatagtcagtatcacatcggcctcacccccttccaacaaagcgaacgagtcgtcataactttcggtaacgcctctcaaattaaaatagtccgaagcctctattttctggataatccgccgggaagtctccgaatggtcattatcgactaccgaaacgcctatatgccgcacatccatcgtcgttacccacggaataatcaatatcaccattacagggaaaacaatcaccaacttcggcaagaacgcattccgaaaaaattgtcgtatctctttatctaataaaacaaacaatgttttcatcgttattcgagtttatcgttaaactttttaagggcgacacccaccagaacagccgtcatggcaaagagaatacaggcttgctgccatacttcggcgaacggcatgccccctatcatcagttttcgcacggcatcgatataccaacgagccggcacgatacacgacaatgcctgtaaaatgccgggcatattctccaccggaaacaacattcccgacaacattataataggcaacatcagtaccatacccgaaatgagcattgccgtaacctgcgtattagccattgtagaaataaacaatcctaatgccagcgaaagcaccaaatagagcaaagaaagccctactaaaccaaccatagaacccgacatcggtactccgaggacgtatcgcgccaataccagaataacgacaagattcacgcacgaaagcaaaaaataaggaatcatcttggcaaaaatgatccatatcggtcgcaccggcgacaccaacaggacctccatcgtaccggtctctttttccctcacgatagatacagaagtcatcatggcacaaatcaaaataaaaatcaaccccatgattcccggcacgaaattgtaagaactctttatctgcgggttgtacaacacccgtgtcgccggagcgaccgacgcgacggaaattcccgactgaaaagaactttgcaaatatcctaaacctgtacctgcattattggggttcgacgcatcgagaataaactgcaccgccgcctctgagactccctcaatcccggcattcgttaccaaccgatcataatcctcagaaaaaaccaccaccgcggtaacatcgcctttccgcaaaacatcgtcgatctcagcctgagaaatatatcctttgaatgtaaaatacggattggcttccatacgctcgatttgctgtcgaatagtttccgtacgattgggagccactacggcaaaatcgatattattcatttcggtcgatatagcgaaaccaaacaaaagaatctgcacgatagggagcaacagcacgatcaacatcgtgcgtttatcccgtaaaatatgcaaagcctcctttttgacaaatgacaaaaatcctcccatatctattctccccgtttagcgctgcgagccaaaatcctgaaaacttcgtccatcgacccgacagcatattgtttcttcaattcggccggagaacccaaagcctttacttttccatcgaccatgatagataccctcgaacaatattccgcttcatccatatagtgcgtagttacaaaaacagttgttcccccggaagcggcttcataaatcatctcccaaaattgacgacgggtaaccgggtccactcctcccgtgggttcgtcgagaaaaaccacctccgggcgatgcaaagtcgcaatggaaaaagccaacttctgtttccagcctaagggaagagaacctactagcgtatcaatttccgatcggaaatgcaatcgattcaacatctccaccgtccggcgaagcatttggtaacggctcagcccataaattccggcatacagacggatattctcgcgaacggtcaagtcatcgtacaacgaaaatttttgactcatataaccgatatgcttctttatctcctctccctgcgtcatcacatcgtacccggcaaccattccgcgacccgatgtcggataactcaacccgcaaagcatacgcatggctgtggtcttaccggctccattagcgcctaaaaaaccgaatatctcccctcgtttcacatcgaacgttatatggtcgaccgcgacaaaatcgccgaaacatttacacaaatccctaaccgatataattatatcattcatgctgcatcaattttataaaaacatcttcgattccgggttcgaccggacgaatcgaaacatgatgaaaaccttgtccgttcaaatgagtcacaaactcatcggaatcgaacatactatcggcaactaaatgatgagactcaccgaacgggtaacattccttcacgccttttatcctacgagcctcgacgagtaatccgtacatattgtctcccgataacgcatacaaaggttcatcgaaccgctccgtaataccggcaggagtatctatccccagaatttttccgttattgcacaaggctatacggtcgcaacgacaagcctcgtccatataaggcgtagaaacaagaatcgaaatacctttgcttttcaactccgacaacatatcccaaaattcacttcgggaaacggcatcgaccccggtcgtaggctcatcgagaaataacaccgacggacggtgaatcaaagcacagcacaaagccaatttctgcttcatgccacccgacaatttccctgcacgccgttttcgaaacggttctatttgagtgtaaataggagcgatcaaatcataattatctttcactcctaccccgaacagggctgcaaaaaattcaagattttcctcaaccgacagatcgggataaagcgaaaaacgccccggcatatatcccacccgttttcggatttctttatattgcccgacaatatcgaatccatctactgtcgccactccatcgtcgggattcagcaacgtcgcaagcagacgaaaaagcgtggtcttgccggctccatcgggacctatcaaaccgaacaactccccccgcctcacctcgaacgttatattttcgattgccgtgagcgaaccgtaccgcttggtcaatcctcgtatttctatgacattccgtacagccatctccctatttgttttaagttgttattgatgaagacgcacctctccgtaaaggcctatttttaacaggccgtcgttctcgaccgcgattttcaccgcataaacgaggttggctcgggtatcacgggtctgaatcgacttgggtgtgaactcgctctccgatgcaatccatgtaatgcgacccggatattctctctgcttatctcccccgaaatcggcaacgacggtaacctcctgccccacgctcaaatcggacaactgatccgatgtgaaataagcccgcaaatacaatcggtccatatcggcgaccttcatcaaaggcttaccggtcgcagccaactccccggcctcgctatacttcaccaataccgaaccgtcgataggagaaacgatacgacatttggaaagacggtcttcgacctgagctatttgcaaatcaatagccgatgcattttcatcgatcgacgacgtattgtttttcaaggtcgagagcaaagcatccaactgcccgttcaaaacccgaagagacgcattaatatcgtccaactgcttcgtagtggccgccccgtctttcaacaaattttccactcggcgacgttctgtctcctgttgggcgatttgtcccctcaaagccgctgcttgcttggaaatatcaggacggttactatgcaccgaagcccgctgacgctccaattgcaacttctgtaaataaagctgtacggtatctatcgcacctacctgtttccctgccgaaagagtatcgccttcctcgacatcgaagctgagaatacggcccgccgcttcggccgacacgagaacttcggttgcctcgaacgttcctgttgcatcaaaatctccaccgttgccacaagctgccagcacgacagtcatggcgctataaactgctatccttttcattttacgctgtatttatcgattaatggtatgtttatattcataaattgctttcagcaattctatttcacgcatgctgcgagccatagaggccgtggattcgtcggtaatcttcgacaacaagtcatgggtatctataattccgttccgcaatttagactcggccgcctcgcgtaccgaccgacgaagagccacgatacggtcgtcatcggcaatcgccttgcgtaaacgcgcgatatccccattctcctgagccgcctgcaaattcatattaaaaaggaatacatctcgctgaacttcgacctgctgccgagaagtacgcaatttatttaaattatttttctgtgtataataagctccgaaattccaagacaatttcacgccgagcatagcattccaactccaatcgttattcatcatactctgcatatagtccaatcccggataaccataatatccctgagcaaaaaatcccaagcggggcatagacgacgattttaccatcttttcttgcgccgtaagcctgtctatcttcgctgcgaacatagccaactcgggacgtgccgattctcccgacaggggctgtacggcactgggatgctgcaactttcgatcgcccaccttttgtccgatgaatatgcctaacatacgacgataactatcgcaagaagactcgaactgaatgagctgctgtcctaccgaaagcaactcggcctccaaaacatcggcatcggactgcatcgccaccccgttcctctgcaacgcccggactttttccaaattactccgtagaagattcagtgtcaaattcgtttgagctatgcgctcgtcgagcaaaaggattccgaaatagagatcgtccacccggccttccagttcgtaaagatcgacatctgtcatcgttttctgttcggcggcctctgctctggctatacgcttgtcggcaacagacttgcccccgtcccaaatcgtttggttcaattccaatgccactttatattggtcttttctcaatcccggaatttccagaccttgctgagccaacataccggtcagttccttcgggaagttaggcgcatcggtctgccaagtagcctgagcggaaaaagcaagctgcggtatccatgccctcgcagcattagaaaggttatactgttcggtttggtgaaccaaatcgtactgacgaatttctggataattttcccgggcaagtcgccggcattcgtcgagcgaaagttgagcatgcccggcaactaccgagaacagccatacacacaaaataacaactcgcttcataattcattatttttttatacgacgcataatcatttcaatattctcagccttacgcaattcaaaaaagcgattccgatcggcagcaatatctcccaatataggctctataatcggataggcaataaacggaaaaacattaagagaaataatatccaacaataacattcggacatcgacccattctacctttccctgcgcatgcaactcgtccaactcctgctgaatacccttcatcaaacaatctgccactttcacgattttatcgctcataagtttatatcgttcaggacggctaaaaacctcgtttacgataaaacgaggtaattgcggattagcggcaatgaaatcaaaatgacaggtaactccgtctttcagccgctccaagagaggcaatcccggttgaccgaaagcagccagaaccgactcgctcatcaattgtactttttctgtaagaatacgctcgaacaactgttccttcgttctgaaataataatgcaacatggcgtgtgtcacgccagctgcatgcgcgatcgaagtagtctttgccccatcgaatcccttcaacataaactcttgctcggccgctttcaaaatctccgattcggtatctttctttttcatattttgtattaacaatatagtttaataatttagtctaacaattttgttaatacaaatatataagatatcatttcagaataacatcactcttctttctttttgtatttatttaacactatcgtccgctaatccaataggaaaaacgaaagaaatagcgggtttatcaacaacataggcaatcccctgtaaccgaaataacgacaggcaatcccaagaatagagcgattaatttccacgaagcatctggaagtaaataagattcagtagaaaattcgtggggacagacttgaattttagcgattacacgtctcccttatattgctgacgcaacacaggggagcccccgaagaaacacccatttctgaggagaggggttaagattaatagcttagaaatttttgaggataacgttagataaaatgaaatatttagcatttaccctctcccctgctgtgccccgtagcattacggggcgctacaaaacaatatagggaaaaaggctgcttttcaatcctcctcccctgtgttttgcaacgtaaaatataggggaggtgtccgaagaacggaggggttaaaaaacagcgacagtaacagcaacaaaatcaaatcgcaatctctccccctgccgtgtcccgcagcattgcggggcgctacaaaacaatatagggaaaaagactgcgttgcaatcctcctcccctgtgttgtgcacagcaaaatataggggaggtgtccgaagaacggaggggttaaaaaactgcgacagcaacagcaataaaatcaaatcgcaacctctccccctgccgtatcccgcagcattgcggggtgtggcgcaacgatatagggggagtgccctcagggcgagggggttaaaacagaaacagaaaaacgaaaagattgaatctgcgatgagtagaggaaaaagattaaaggagacattttgaacagcctttcaacccctccgtcacttcgtgccacctcccctatcgcacattcgtgcgcagaggaggaggttaatactttcggccgtttcttcggtgaggggctggaatatacaaggacaatcccctctaattatcgactgaaccgtagataatatgcaaccgacttagataaaaagagcaaaggttggtatgcctaaacaaaacacaaacctttttctcaaaaaataggactatccgttgtacagacagccctatccaaaaaagtctttatttactataattacaactctatatccccattgaacacttcgtgccacggcagaccttgtttgttgagctgttccatgaaaggatcgggatcgaattcctctacgttataaacgcccggttttttccacttgccggtgagaaacatcatggctccgatcatagcaggaacgcccgtggtatagctcacaccctgtgctccggtttcgagataggcagcatgatggctgcaattattatacacataataagtaagttcctttccatcttttccaataccccgaatgcgacaaccgatagaggtctctcccgtgtaattcttaccgaggtctcccggattgggcaaaacggctttaaggaactggataggtacgatctctactccgttgtacataataggatcgatacgcgccataccgatattctgaatcacacgcaaatgagtgaggtactcctgcccgaaagtcatccaaaaacgagcacgtttaatcgtaggataatttttaaccagcgattccaactcctcgtgataaatcaaataggattctttggggcctatattaggataagtgagaggacgatgaatctcgtgcggctctgtctcgatccattttccgttctcgtaatacttacctttttgggttacttcccggatattgatttcgggattgaaattggtagcgaatgccataccatgattaccggcattgcaatcgacaatatcgagatattgcatctctttgaaataatgtttcgccgcataggccgtataaaccccgctcacacccggatcgaatccgcaaccgagaatagccgtcaacccggcttgctcaaaacgttcccgataagcccactgccatttatattcgtatttagcttcgtcgagaggctcatagttggcggtatcgagataattgacaccgcaatgcaaacaggcatccataatcgtcaagtcctgataaggcaaagccacattgacaacgatatcgggcttatgctttttgaacaatgccactaaatcctcaaccttgtcggcatcgacacggtcggtcacgatacgattgccgccaatggcatcggctatggcatcacacttggactgcgtgcgacttgccaaaacgatttcggtaaacacatcgggattctgcgctattttatgcgccaccaccgttcctactcctccggctccgataataagtacttttcccattttatatctctgttttttttattcgttattcatttccacactcaaaaacgatgctcgacacaaacccttttttcttcttccaagaaaacgactcattcacctttatcggtatcggacgtcaggtcgagcacctccttatccccgcttttatcgaaatactgcttccttaacggagacgctgttatttctttataaaaagaacgattacggaatacatctatcgccaaataaagagcgtgacggaacgactgctcgtcggctcggttctgtccggctatgtcgtatgccgtaccatgatcgggagaagtacgaactaccggtaatccggccgtataattcaccccgtcttccatcgctatcgccttgaaaggcgccaatccttgatcgtgatacatagccaacacaccgtcgaattgacgataatgtccggttccgaaaaagccatcggccggataagggccaaaacaaagcattcctttggcattggcctcttgaatggctggctttatgatttcaatctcttctgttcccaaaagtccgtcgtctccggcatgagggtttaacgccaacacggcaatccgaggctttaccacacaaaaatcctgcctcaacgactgttcaaaaatttgcaacttttcaagaatggtttccttcgtaacaacagacgagactttcgaaacaggcacatgccccgaaaccaaagcgacccgtaaagtatcgttcaacaatatcatcaacgccttttgtccgttccccaagcgacgttcaagatactcggtatgtccgggaaaatcaaacttatcggactgtatggcatgtttgtttatgggagccgtcaacaatacgtctatcgaaccagcttccatatcggcagcagctcgttcaagagcggcataagcagcctcccctcctattgccgtagcctttcctatttccactttcacatcgtcgtcgacacaagtaatcaaattcactttattttcatcggctgccgatgcatcgctaataatattaaaattaacagccggaatatcgagagccttccggtgataggcggcaaccttagccgaaccatagacgacaggtgtacaaagctccacgatatgtgggtcggacaatgttttgaggataacctcataccctactccattgatgtcaccctgggtaatccccacttttattttacattccataactccaaatctttataacttaattttctcggcatacgatcaccgacctaatttgagctcactaaggtaacaaaaatccacgatataccctgccggatataagaactatttaaaaccccgattctatttcttgtttttctcggccgtagacaacataccgcaagccgcaaatatatcttctcctctcgaagcccgtatagtcgccacgactccacgattattcaatcgatcccgaaaagcctccatcgattgcatatcggtacttttaagagttacccccgggatagcgtgaaaccgtatcaggttcacccgacaatccatacctttcaacaaacgagccaatgcatcggcatgatccaaactatcattgtacccgttaaacaaaatatattcgaaagaaagcctacgttggtgagaaaagtcgcgccgacgcaataaatccaagacatcggtcatcgggaatgctttctccacaggcataattcgcaaacgctcctccgggaaaggagagtgaagactcacggccaaatggcatcggctctcatcgagaaaacgacgtatgccgttcaaatggcctatcgtagacacggtgattcgcttcggactccatgcaaaaccccattccgatgtaagaacagacagagccctcatcacctcgtcgagattatcaaacggttcccccatacccataaataccagattcgtcagtttatcgctatactccaccgaaagaatctgattaattatttcggcagaagacaagctacgcttaaaaccctgttttccggtcatgcaaaaactacaattcatcttgcagcccacctgcgacgacacacacaaagtagacctgtcgcgatcgggaatataaaccgtttccacaaaatcatcgcctcctacccgaaaaagatattttatcgttccatcggtagaacgaagagactgaaccggagcctcccggcctatatcatagcgctgcgacaataactcccgatgcttcaacgaaaggttcgacatgcccgcaatatgatctatacgcttttcataaagccacgaagctatctgtttcgccgcgaaacgaggcagtccgttctcctcggctaccgtctgtaactcctctaacgtttttcccaacaaatgttccttttccatgactatcgagagattctacaacacaaatgcaaagtgcgtgtatcgagccgacagccacgatatacgcactctgtgtttatcaaaaaatccgtttattagaagaaacgaatcatcgtattttctatttccgctttatcccgaagaacttccatcaagcgactattgatgagatagccgtaattctgctgaatcttctgagtttctgtctgggcatcgaacggttgttccgaaacggttttgtccgtaaccgtaaacacatacacccctctcgatcccttcactggacctacgagctttccattctccgaaacgggagccaaaccgctcaacaccggttcgtaaccgacacctgcgatagacggggaagagaaagacacgaacttggcgctatccacttgtgccttcatagcctcggcatatccggccaaagaattgagattcttcgatttcaagtcaccgataatcttctcggctttcttatcgttacgaatctgcatagccaatatatctttcacttgttccagaggagcatatccttcttttgtaatgttgtcaagagcagcaaccacgaacgagttatcgagcgtaaagatttccgaaacctcgcctttgtcggtattaaacgcccaacgaatggcttgacgggcatcattgattccgggtaatgaataatcttcggcactgcattcatagctgttaaccgtatatccggcctcttttgcccccgtattgaatttctctgcattattattggctgcactataagaagacaactggttataaagagcggtatgagtttctgtactgggattgacagccaaaacataagccgctactttggcttttttcaccggagccgtacgcgacaatatttgtacaatgtgttccccgcccaagctctcggccttgaaataaccgtttccattctcgctaaatactttgttgatgaaaggtcttcccacactggaagccatattctccattaaccaaatttcatcattcccgttgtatttcggggcaagttcggcgaaacttcctccatgattcaacacatttaaaacgctatcgatctctgtcgaacggggttgaaacgaaagcaaacgaactttgatagaatccggggcgaccttcgtatccatcaaacgatacatcgtataagtatcgttttcgaattccatcggagacgattcatttacactggccgtttgtgcaaattttttcattttttcgggcatcgacgaaatagccacgaaagaatcgtcataagactcatcggaattattggcgataaaagctaccacatcgtccgtcgtagcgaataccgattcgttcatttctgccttttccttagctttggcataatcggcctcactgggtacgatatttaccgtgatgtatttgatcgaacgacgttcgggtgttttataaaacgacttcatcttgttgtattcggctttaagctcactgtcgcttacagcgatcgtcgaatcggcaatcgatgtatacggttgtaaagcataagctatattggccgaagttttattatcttcgaacgaattttcaagatccagcttattcggcataatcgcacgattcaataaattggcgaatttctgaacggcacgattttgtttaacctcctgttcgagtctgagccacatttggcgttgaggctctatttgcgcgagcaactccggtgtattgtatccatgagattccggatcgagaaccacctgcataaaattaagcaaaccttgacggtcgaactctccggtttgaggattcgtaaaatactggcgcacttgcggagatatattgtcaccgcttagcaagtcggcaagttcttctttgctgacaacgattcccagttcttcaagttcctcgctcaacaatatttcattcaccatctggtcataaacctcttgattgatacgggaaacatacccttcgggcaaagtcattccgcgttgtccatacatttgttgtaattcatctgtacgtacctttacacgttcttgaaattcttcgactccgatattcgtcccgttcacgacagcgactttgttttgattcatggcgtagaaggtatgtcccgaattcaggaagtcccctacgataaaagcgagcaaggcgacccctataatcaccacgagcaggccggctttacttctgattttgtttaacgtagccatttgttactttgaatgaattttagttttatattttattattttttatcctcttttactaagggcacgaagatacaaaaatttggatttatatcggcagcgaaagtacaaaaaaatctcttatttctctattttcatgcgtacaagttctattttcgtagcttttcgttgtaaaatagtaaaccggtaattccctatttccacggtctctccgagcctcggcaatgtctgataatgatacaagatatacccggcgatcgtgagataatcgtccgattcgggaatatccaatccgaactcctcgttgattcgctcgatttccatacgtcccgaaaactcgaattcgtcgtcgctcactttacgggcgacaagattttgagtatcatgttcgtcctcgatgtctccgaatatttcctcgaccaaatcttcgagagttaccagtccggcagttcccccgaactcatcgaccacaatagccaaacttttcttctgttgcatcaaagtgcgcatcaacttattggccaacatgctctcgggagcgaaaacagccgggcgaatactctttttccaatcttcgtgccgacgaaacatctccgatgcatggatatatcccagaatattatcgatattctcgcgataaaccaccactttggatatgccggtactgatgaacgtttgtaacaactcctccaccgtaacctcgtcaatatccacagccacaagttcggtacggggtatcatgcaatcccgtaaatgaatattcgaaaagtcgagagcattttggaatattttcatctccggctccaccggttcgcccgaatcagattcttctatacttttctggataaacgagtcaagttctatcttgctcatcagggctccataaggttgatgtgcgatcttcactccccccagtctcatcacgcatttggaaacgacagacgtaaacttcgaaatcggatataaaacgacataaagcaaccacacgaaaggagagaaaaaacgcatcgtcgcattcgggttaacacggaaaatcgtcttgggcaaaaattcacccacgaacaaaattaacaaagtggacagcaacgtctgcatcaaaacgacaaaagcctcctgattccacaccaaagctatgaccggctccaaaagagccgccatgcccataccgtaaataaccaaagctatattattgcccaccagcatggtcgagataaactgctcctcgtttccataaaacagccccaatatcttcgacatcatgccctgctgtttcatatccagttcaacccgcactttattcgacgacacgaaagcaatctccatacccgaaaaaaaggccgagaaaagcaacgctatgataataatcaaaatccaattcatggctttatcgcttgtttaggaacggcgacactatcgaccttcgccgaatcgggagggacagaatcccgcttgatagggaatataccgctggtacgacggattttataccgggtcatctgttcgttagacgtaaacccatacccctcgatgacttcgtccggagtttctatatgaatgaacgaatcggagtaaatctcccgtttacgctgatcccaaaagatttgagacgtaagaaaaacctcttctttcgtattctctatacgcacattccggtcgagccgccacaactgtttgttcttaaaataaatagccgtatcaccctgaataagggcctcggtagcgaaaacagaatcgaacttctccacatgcaatccccgagggaaataccagtatggctcttgggcgttctcatacatcaaccattcgggagcattgatacgatacctcgtcacacccgaatccgaaataagagtcatgacatcgagtgtacgcaacgtaggaacttccgcggcatcttcgaatcccttcaccacttcgttcttaggccccgaacacgcactccacaacaaaggaaaagcgacaaacgctaccacccacaaacgagagatacagataaaccacctatcggtattttctttttttgccattccagataaactatgtcacaaaattataaatagttacacggctctccaaataatcccacgaaattatcctcttggcaaagccaatccttaaaacagcagaggattcacattccactatcggaaagatattttaacctcccccctgccgtgcccagcagcattgcggggcgcaaaaacagcatagggaaaaagaccacttttcaatcctctccccctgtgtggcacagccatataggggggagtgcccgtagggggttaaaaagatagaggggttaaaaaaacagcgacagcaacagaatcaagtatcccctcctcctctgtgttttgcacagcaaaatataggggaggtgtccgaaggacggaggggttgaaaaacagcgacaacaacaaaccgggtatcacactcctcccctgccgtgccccgcagccttacgagacgctacaaaacagcatagggaaaaagaccacttttcaatcctctccccctgtgtggcacagccatatagggggagtgcccgtagggggttaaaaagatagaggggttgagaaagaaatcaaaagcacgggaaaatacccgcctttatcgggcggtaaagacgcaagggattaaaaaaacgccccggttccccgaggcgtttccacactatggctaatcatacaaattatttcacgataaacgattttaccacgactccctgcgacgtagagtattgcaacatatagctgcctttcgaaagattcgagacatcgacagtcgtcacgttatcgtcaatctcaccgctttgcaacgccatacccgccacgttatagatagcatatttgccttcggcataaggtacttctatcgtaagtacatcggtggcaggaaccggataaattttaacatcttcggcaagcacttcgtcgatacccgaagtcgaaagctgcaaatcgaatttcttttcataagaattacggctttctttatgaatcgccttgatataaacagttttgtgaacggctttatcctcgatcaactttgtcgtatagagcttaccgtcacggacttcgtaactcggttcggcataagtaccgccgaattgcatcattcctttcagttcgaattcatattcggcatcaggcatgtcgctcaataccgtgacatcggcgactgcgactcccgccggagttcctattttcacgcgagtcgtgctcaggcgtatgtcatacggagtttccgatttcggagccacccctacgaccactctgtggttatcgggataggacccttgtacatggtctcctaagttatctaacgtataaaatccattatttacacctccccagccccaatttacatggtaactggtaaatccgtcccagccgtcgaggttaaaacagtgtcccacttgattcccttcgttaccggcatagatgaccgcacgacctcgtttcaactcgctttgaataagctcgtgccattcattgtcctttccggcataatctatgtcgcgagaataggtcgtacatgtctccgggaaaccgtaatagtgtctgaaataccccgggatattttgtgttatggctcctgaaccgtctgcaccgtattccatatcgatcaacaccccgcaatggtacaacaatctggctacctcgctataattattggctcccgataaaatcgcatcccaatcataatcgggttcgttgtcgaaattgaccgacaaaaagccggcattcgtcgatgtataggatttcgttccctgtccccgcaacggataccgcactacggtcagagcctgccccatagctacggccacgcaaccgacgtaggctcgaccgcccggaccgccggacatttgaggacaaagactattgtaaggtgaatcttgattccatgctactgttatcagcggatcgattctatcctctgtcgcacggcttacgagatcgcccgcccaacgataatgacgttggagagccggggtttgacgagctatttttatttggtcggtatattctttcaaccaaccttttatccattccggttgaccttccgaaacatactcgctatcgaatgaatatcccaataagggatctacggtatcttcggccgaaatcaaagcccacccacctttttcaaaccgaatgatataatacatcggctcatttccttgaaatacggtttctacttgggctttaccgcctttaaacataacgccgccccgttgactcaacagcatattggctgtctctaccgccgtgctttcgggcactaccgccgcataattcccacctatccatgagaaaagcactgccactaataacaataatctatatttcataatcggtttttggtttcgttttacaaatatatctttgtattgactgacaaaaataggcaatccgaatatattctgcaacaatttaacattttctatgttttttatccgacaaaatgaagtatttattttctttacacggcaataccctcataacaaaagcagaattacccccactcccccaatatttccgtaacaatatatagggaaacgcccaacagggcaagagagttaaaacagagaaatcccattttcaatcctctccccttgccgtgacccgcagcattacggggtgttttgcaacgcaaaatataggggaggcgaaggacggaggggttaataaaacatcggcagcaacaaaatcaagtaccaatcctctccccctgccgtgcctagcagcattgcgggacgctacaaaacaataggaagaaaaggttacttctcaaccctcctcctctgtgttttgcgcagcaaaatataggggaggtgtccggaggacggaggggttaaaaaacagagacagcaacaaaatcaggtatcaaactcctcccctgccgtgcccagcagccttacgaggtgtcgtatataaaatcgaagcagaagcgaaaggggaatacatctcaccctcctcctctgtgttttgcgcagcaaaatataggggaggtggcacgcagtgacggaggggttaaaccagacaatcaaaaaattcttatgctatcttttcaacccctctcctccggaacttcgttccttcggtctctcccctataccgctacgcgacacaggggagaaggttgaatagttcccgctcaccacataaaaaatgctagaccatgaaagaaaaagaatctcccttcctcctatattctgaaaaaaaataggaaagtcaactcttaaaataaggattcacgttccactatcgaaaggatattttaaaactcctcccctgccgtgcccagcagccttacgaggtgtcgtatataaaatcgaagcagaagcgaaaggggaatacatctcaccctcctcccctgtgttttgcgcagcaaaatataggggaggtggccaaaggacggaggggttaaaccagacaatcaaaagaattctgagtattcttttttaacctctacaataaaaatgaccttgtaatattcctcaacccctctcctccggaacttcgttccttcggtctctcccctataccgctacgcgacacaggggagaaggttgaatagttcccgctcaccacataaaaaatgctagaccatgaaagaaaaagaatctcccttcctcctatattctgaaaaaaaataggaaagtcaactcttaaaataaggattcacgttccactatcgaaaggatattttaaaactcctcccctgccgtgcccagcagccttacgaggtgtcgtatataaaatcgaagcagaagcgaaagggaaatacatctccccctcctcctctgtgttttgcgcagcaaaatataggggaggtggccgaaggacggaggggttagaaaagaataaaaaaaagagtcgatgtctaaaagaggaataagtaaataaggataaatttatgttgcatctttataatatctatcaatctgaatacaagatagataaaaattatttattacaaaatcgataaataattaagaaatcactataaactaattaaaaatatgcttatatttgtgttgataccgtaaatggactcgcggtggtatcgaacagatataccacgagaggaggttttatatagcctccggtccatgatgatgcaaatagcgatttgcattaggagttcatttacagtatcaattactcactcatcagggtcggaggcttttttatataaaaagcgatgacaaaatattctttcttacggcttagattattaagaacaatccgggagtggatttgttcagcgaacatgattgatatagaacattttacaaaaatattctattcactcggcgaaatcgatcggtctattgttaaaaaatacatacacggagattctataagaaacatctcccgatgtctcggctattcagagtcctttatttacgaaaggatatacaaatttcacaagaaaatacgaaaagtttctcgtcacgagaaggcacaagatttcgactaaatccagcttccgcagatttactctacaacgacagactcggtactgacaataacaaagcagccggtctctaaaagaccggctgctcaataactctatccttaaaaggatcaacgaatacttttcattttaagattttgtctgataagggactgcatatgaagtttttctgttgcagacaacggtctcatttccgacaatttcatctcgtttttcaacaactttatcgacgacgggatattagtatttgcggctgcggcttgaacagatcctttaaagaagagagatgcattccacaaatcataccaccctaagctaaaattgctgtcactggggtcgacatcggcattaaagcaataaagtccacaccaacgatcttgcgcatatacaacctcgtcgccttgtgcattttcagcgaagtttacatattcaaaattatcggtttcactctctggaagtcctgcgaaagtgaaaatagcgttaaccattccgacattagtttctacctgcataactcccataatttgtaaatcagcaattctaaaaccattatcggtcacttcggcttccagttgattgggatacccatccttaaaatagaaatggtctattacaagagtatcaggattatttgcatgttttaatgaaaactcagtatcgaatcccattggtgtacttccgggttgttgtgtttgaagatcatattgatagaacaagaatccgaatgtacctgtaaaatcactttcttgtgcagcggtatactcccaataaggagctgcaacggtttgagtttcttcatcgacgccaccaaccaatgcagcagacacatttccgccggcatcagcgaaagcaccctcggcaaaatcgaggaatacatacgatacggcttcgttctcgtcgaacactacactttcgggcaaagtaatcgtaacagactcattattgatagcgacactctcgatcgtaccgctggcataagaggtaaggttacccttcgtcacatcgtaggtgatagcaccgcttcctcgaacaacggtctcgttgaaagtcaaaacgacactgcgtccgccgttcgtagctttatatttattaccgtcgggaacgttcaccaaataaggagcctcttcgtcgggcaattcgacagatgccgaagccacagccccgcaaacgcctttgtcattggatgccacggcatatacatagtacgtagcccctaaattctggttagaaagcgtaccgctcacgctgggtttttcggcagctttcaccaatgtagagccttcgtatttcgcttgcaacaactggtcggggtcgacagtcatcgcctcgtcggttacaatataagaataatatacggttccctctgccggagtaatggttaccttgaaagcatccacggctgttttctcagccgtcaccgttacggcaggaccttcgcccatatccaccggcgtaaagtcttcgaattcggtgcaacctgcccccatgaggcagattgcagagaataatcctataatatattttttcattgctctataattttattattcttcaacttttttcatagtgacggtttgtgcaccgcttgcagcatagcccgtttgttccacaatcgccgcgaacacataggtatttatggaaatggttccattagaaacctgagccgttgccgagcttgcgccattgaaatcgagactcaaagtatactcaccagcagtacccaaatcctgaccggcgttaatcgttatcgacctgaaatcggcacttaccgtacccattaccgatttataagtcgcgccattcgccgccggaacgatctgcgtaaaccaaactcgatctacatagtctgcgtctttcacgacttcgcaagtccaattttgcattccaccttcaaacggattagctcccgatgcattatatttacccaagattccggcagcagccaacgggtgatcgtcatcgctgatcgtgacggtagtcgtgtagttcgcacctaaattacagccttcgggagcagaaagtttgatatcgaaacacacatcgccattatagtcgtcgttatcgataggttcgatcaatatgtaagcaaccatctcgccgtcagcggtaaacgacaaagtattcgacgtatttttcaaacggtaattcacgccctctttcgcagcgtttttaccggcataggcagtcgtatcgatttcaaaacccaccgacacgtcgagccctttggaagcgaccaacgaaacgggtattttaacctcgctaccggcattctcggctatggaagtggacttactgtcaaaagccacgaatgcatctttatcgctgaacataggagtatccaccgattggcacgaagctaacacccctcctacaacagccgcatatataaatttacttattttcataattgtcttctattaaaatttatttgctttgataaccgggattctgatccatattgtcgttatacaaaatatcgttctcgggaattggcaatgcccaacgatagctcgggaaatcgatatttttcgtgagcggatccaagtcgtaatcggtccgaaccaacgacttctgcaaacgtttcatatcgaagaatatatggccctcgaacaagaactctttgcggctttcctcgaacaggttgtcgagcgttaccgaagcgtaagcctcggcattacggttcgtggctacgcggttcaaatcgtcgatagcggttacgcccgataccgtggctccacggtaaatagcctccgaacgtatcagatacatttccgagatacgcaataccggcacgttattgtaggccaacagtccgtttttaccggggaacttggtcgaccagcgataacccggatacttactgttggttttcgtcaatccggtcaggcgcacatcggttgcgtcatacaaatcgataaggtcgttcgatactcgaacgtcgccgtaaccggctccacctgcaacttcgggtgctgtcaagtagtctccgaggtcactgcggctgccgtcgctttgggatacataaacttcaaatatgatttcgctgcccgattggggggctacgtctaccgagccgtcccacatcgatacgaagcggtcgcccgaaagcagacgaaaacgcccgttcttgatcactttcgtcgcataatcggcggccaactgccaatcttcgtggtgcagatacacccgtgccatcaaggcttggataaccggtttcgtcaccgtggccacgacatctttcaccccggcgcgcacatagctgtcgctcatcaggcgttcggcttccaccaagtcgggtataatgaggttttcatacacttccgctaccgtgttacgggagggacgggccgagaggtcgtccttcaacacgatgggcacacccatcgcttctactccggtaatgccgtttgccttgatataaccgtagggttgggcgtaaactcgtaccaaatcgaagtaagccaaagcacgcaagaacaaattctcggctttgatgttgttgatttgctcgtcgcttaccccgtcgcgcgagaattttccttcgttaatcgccgtgagtgctttattacagcccagtatcgcgctatatgcgctcgaccaaagacccatcgtgctggtcgaagtatagttccatgccggttccatacgcatacgtcctgtattgaccgggcctaccataccgttgccgcacatcacgtcgaatgtcaacgggaacgatgccccataccacgagatgactgcccgatagttacccgccgtcgctccgtcgatcccttcaaaggtcgacagagccaattcgtctgactgatccataggcggctccttcgtcaggaagtcctcgcaggaagaaagagccaacgctaaaactgctatcgataaaattatttttttcattgtaacaattcttttttaattgattagaaagtaatatccacacccacgatcatcgaacgggtcatcgggtaactgatgatggtagcacccgaggttccgtgttcgggatcccagtagttcatgttgtggaacgtatagaggttcaatgcgctggcatagatgcgaacaccgctcatcaatgcctttttggtccatttcgaaggcaagctgtatgccagcgtaatatccttgatacgcaagtagctgccatcttcgagataacgggtagaaatagcagagctgttgctcgaattgttgtaaaccggtttcggcaatacattggtgtcgcccggtttcttccaataattcatggcgcctttccaaatgttcgaatcgccgtaagagccgtctgcttcgaacaacgaacggtcttggttcaacaccttgttaccatagcgggcttcgagctgaatgcccagcgatatgcctctccaagaaagctcggtattgaaaccgcccgtccacagaggttcgggagaaccggcattgatacgacgagcctctccgtaattctcggtcaacagcccctcttcgttacgccacaacgcgttaccgttctgaggattcacccccgcatagtcatacaaccaataggtataaagctgttcgcccttgacataacgcaaagtcgttcctataaaatcctgacccggagcaagttcgagcactttcgaacggttggccgcaaagttcacgccggccgtccatttgaagtcgttggtattgaaaatctcggcatccaactgaacctccacaccgctgttgcgaatcttacccacgttctgggcctgcgaagcaaaaccggtcgtatagggcagaggagacgcgatcaacatatcttcggtacgacgggtgtaccagtcgatagaaccgttcaaacggtcgaacagacggaagtcgataccgatattgtgagttttgttggtctcccaagtcaatttgcggttctgcaactgagaaggcaactgaccggtaataccgttgtacacgatgtcggagtacaaaccgtagtgtgcataggctgcaatattgtcgttaccgttcacaccatagctgtaacgcaatttcaattgattaagtaccgatttgatatcctgcatgaaatcttcgttgtgaatattccacgaagcgctggcagcccagaaagtaccccaacgtctgtcgggaccgaacttggagctaccgtccgtacgaatagaaccttttacataataacggcctttgtaattgtattcggctacaccgaagaaagaaaccatcgccatttcggtaagaccgtcacccactcgttggtcttctaccgaaacacccacagagtggtaaggacgttgttgattcacatgataagatataccttgcaagaaagaagattcatacgtattggcttcctgaccgatcaacacattcaacgaatggtcgtcgttgaacaggtcgtcataagtgatcgtattcgaagtagtcaatatgcgatattggctctcggccgtgttcaaagaagcgccataagaagccgtgttcacgaaagccggactgtaagcgcggctggtagtcgtggcatactcgatagagttgttggtacggaacgtcagttgcttgatcggtttccattccaaataaacggttccgttgaatttatactgcttgtcgtatttgtcttgttcgcgaatagcggcgatcgggttcacgttgaacacgaaaggcaaatcgaagttgtagcttccgtcctcgttgtaagcgttcatggtcggagccaaagccatacccgaatagaagggattcgtaggagccaaaccgctatcgcccaacaaactattttgcacatcggaaaccttcatataaccgccatgcagacgagttcccattttcaaccatttgttcaactcggtatcgaggttcgcgcgaatctgcatcttctcgaaacctacggtcggcacgataccgttcgttttattataagacaatgaagtatagtaagtagtcttgcccgcaccgcccgaagcgatcagctcatactcttgcaagctgccgttacgcgtcaactctttcatccagttggtcgcgcgtctgccggccatagcctgcggaaaataatactccgacgagggatcatcgggattatacccggcattgatacgggcatcgcgttgatattgcacatactcttcgaggttggccatgccgaagtcattgtcattggcaagcgtggacacaccgtagcgggcacgggcggtaatcttggatttccccgattctcccgatttggtggtaatcaaaatcacaccgttggcagcacgcgaaccatagatagaagcggcagcggcatccttcaacaccgtcaccgaagctatatcgctggggttgatcaaggcaatcgcgttcatactgttggaaagtccgcctacatcaccgctttccacgggaataccgtcgaccacatacaaagggttgttaccggcgccgatagaactggttccgcgcacccgaatcgtagccacagatcccggttgcccgttgctcgacgaaaccgacacaccggccattttaccggaaagcatcttgtccaccgaagtctcggggatagaagccagatcatcaccatcgaccgtcgcgatagaaccggttttggcctccttccgtatcgtctggtaacctaccaccacgacatcgtcgagagtatgatcggcagaattcaatttaacgaccataccattacgcgcaaaaacctcctgtttttccataccgatgtaggaaataaccaaagttctcgatgccccggcagggatcttgattgtaaacttaccgtccgtgtcggtaatagtagaagcattcgcgcccttcaccaagatagacgcaccgataaccggctcgtcattctctgccgacaacaccgtaccggagatactcgtttgagccaccgctaacgaaatgccagccaacagagcgcacaataacaatgttaattttctcatacgactgaaattaaatttaaataaacgattattccttcttcttttttcacattacacacactcgacaatctttgtcaagttttttttcattacacactactaacactaaaacttttctttccttttttaaccttattatatatataaaacttaataaaaatagcgaatctctatgctcaaatcaacttctcatagaagtattcagcatgcaaagataacaaaaaaacctcaatataaaaatcaaattgaaagaaaacatacctttcgggctttctttttgataaaacccattctcttttttcggagattcataaatatacatttttcacaacaagactaacttattaagaaacaatataatagataattcttaatttaattataaaataatacgagaaacaagaagtattctatgttaataaaatataaaacagaacctactataatcgtattatcgccaaatagcgctaatcttatcaaaattttaactcaattcgtttattcaattaacattcgatacttctcccccacctcccctgccgtgccccgtagcattacggggcatttctccctcctcccctgtgttttgttcagcaaaatataggggaggtgtcacacagtgacggaggggttgaaaaacagcggcagtaacaaaatcaaatctcaccctcctcctctgccgtgccccgtagcattacggggtgttttgcgcagcaaaatatagggggagtgcccgcagggcgaggaggttaaaaaaaacggaggggttaataaacagcgactgtgacagcaacaaaatcaaatctcaacctctccccatatcgtgtctcgtagcattacggggtgtcacaaaacagtatggagaaaaaggctgcattgcaatcctcctcccctgtgttttgcgcagcaaaatatagggaaggtgtcacacagtgacggaggggttaaaaaaacagcgacagcaacaaaccgggtatcacactctccccctgtgttttgcgtagcaaaatatagggggagtgcccgcagggcgagggggttaaaacaacagagaagttaaaaaaaattacacaaacagaaaaaacaaatgactccaattaaacactttgaccagaagcctttaatctccgaacagtctctttcaacaactctatcacagccggttgattctcgaaaatcgctcgattttcaatcctcaatacggttattcctcgtgcagatagactgttatcacggctcccgtctctaagactcccttcgattgtataatggccttgcccgtccaattctattcccaacttcaattcgggacagtaaaaatccaatatatattcacccaccgaaaattgccggcggaatctcactccatcgatttgtcggtttttcaatatcagccaaagagtcgcttcgtattttgtcccgttggaacgaagctctttccgctggacctctttctcctttctgttgaaacttcgtttcataactcatttagaatgatttacaaatataatttcctagaatggtaaatccaactacttcccctcttattttttcaaagctcctctataatatttatttacctctaccgatatttctaccccctacaaataaaaattgccttgtaatattcctcaacccctctcctccggaactgccgttccttcggtctctcccctatatttccctacggaaacacaggggagaaggttgaatacttcttatcctaccgacaaaaatcacataataaaagggtatcaccctctccccccctgccgtctcccgcagcattgcggggcactacaaaacaatataaggaaaaaggctgcgttgcaatcctcctcccctgtgttttgcgcagcaaaatataggggaggtgtccgaaggacggaggggttgaaaagaccagcaaaagcatgagcaaaatccccacctttatcgggcggtgaagtcgcaaggaagacggagggaaaagggcgaggactgtttgagcggagcgagttccgcagaccccgacggcgaccgtagcgacaagccaaaaagcccgataactgcggcggcgtttctttgttcgttcttctcgctgttgagaagaacgaacaaagaaagcgaattagtataacaaggactttctttgacagggaaagaaagtcctttgtatccccctacccagcctcacgagcagaaaaaaacagccccattccgaaaacacaagcgtataaaaagggagttgaaaaatagaagaaaatagacaaaatcgccccattagtataaatctgagaaaaaaaagaaccgttcatgcatgcatacacattctcttttgtacttttgtctaaaattttaagctgtgaatcttatcatcgatcaaggaaactcgataaccaaaatggcactctttcgggcaggacgattgcaaaatgtctatttctacccgaaatgggactcaacgaccgttatcgacttcttgaacgttcacgaagtcgatgccgccatattctcgacagtcaccgagtacgatcccgaagccatagcgatactgcgacagcgactaccctactttttaaaattcgaccattcatcggaactccccattaaaataggatatgccacccccgaaacattaggtctggacagaatcgccgcagtagtgggagccgccatgcaatgccccgacaaagcagtgctcatcgtcgatgcaggcacatgcgtcacctacgatctactcaccgccgacggcacgtttgccggcggaaacatagcaccgggcatccgattgagattacgggccatgcacgaacacacgggaaaactccccctcatcgacgatgcaggagagacacccgaaataggattcagcaccgaaaccgccatgcgggcaggagctgtgctcggcgtcgcttatgaaatagaaggatatatagcccggttaaacaaggtttatcccgaccttttcgtttttttaacagggggagatgccttaaaattggctgcaaaaataaaaagtcgcatctttgtggacgaaaacttggtactaaccggcttaaacagaatcttacaagaaaatgctaaaatataaaattctctttatctgcttgtcgatagggctcgtcgcctttgcccaaaacgggacaagctcgccctattccagattcggatatggtattttgggtgacaacgccataggcgctcaacgagctatgggtggcgtaggatatgccttgcacaacaatcggcaaatcaatgtgatgaacccggcttcctatgcaagcatggattcgctcacttttcttttcgatataggactcacctatcaaaatacaatcaccagagaaggctcgctaaaagaaaacagccaaagcgggtcgctcgactacatcgtcatgcagtttccattgggacggtacatggccggtagcgtggggctcctgccctattccaatgtaggctactctttcataaacagcatagacaacggctcggatagccggtcgggcgatggcaacatctcacaagcctatgtaggagtaagcggtagacccttcaaaggattctcgataggagccaacatcagctacctcttcgggaacctcaccaacaccaacaccgtagtaccggagagcggcagcagcggtattttcgaaaccatgctcaaagtacgcgactaccatttatcgttcggagcccaatacgccatagaatggaacaaaaagcatacgatcacgctcggtgcggtttactcccccgggaaaaccctattgggccgggcatacaccagtacctacgatgtaagctccaacacaacgatcgatgccgataccctgaaaatgaaaaacaattattcattggcctcgacatacggcggcggtatcagttacaactacgacaaacgccttaccatagcggccgacgtaacctaccagaattgggcggacgccaaatttacgaatctcaccgccggacaattacaatcttccaaaggacaattcaataaccgattaaaaatagcattgggagccgaattccgtccgaaaaacatgggaggaaactatttcgaacacgtcaactaccgggcaggtatcttctacaatcgctcttatctgaaaataaacgggaacgatatggacgaaatcggagccacttgtggtttcggttttccccttgccacagacaaatcggtagtcaacgtatcgttcgagtacatcaatcgccaatgcacccccgttaaactcattaccgaagaccatttcagaatatcggtaagcctcacttttaacgaaatgtggttctggcaacgcaagttcgaataaaattctactacctataaaaacgacgaagcgattgcgtcaaaacgaagaagctgttttaaatttattccgagacagattgagacctatgttgaagcagattggagtccgagatttttgtcaatagcgggctattgacaaaaatcaagggattcaagatgcgagacaggggttcaacatggccggaacatacctgcttgcaatgataatattatttctcaataaatttaaaacagcttctaaatgaccgttctgaaaagtcacagatcgtaaccgctaaaccccaaagagccgtatcaaaactcttatagagcaacgatgcggctcttccttcgtaaaattatttttacctccttcttacctttttaggctgctcgaattttcatctaatctctccccctgttcatctggactaccccaaaaactgaaatacaaaaaactattatcctcctcccctgtgttttgcacagcaaaatataggggaggtgtccgaaggacggaggggttaaaaaaaacagcgacagtaacaatccccgattccgcctttatcgggcggcgaagacgcaagggagacggagggaaaagggcgaggactgtttgagcggagcgagttccgcagcccccccgacggcgaccgtagcgacaagccaaaaggcccgataactgcggcggcgcttcttggttcgttcttctcgctgttgagaaaaatgaacaaataaacgatctttttcaacccctctcctcagaaactgccgttccttcggtctctcccctatatttccctacggaaacacaggggagaaggttaaatagctcctgctcgccacataaaaatactagaccacaaaagaaaaagaatcccctcctccctatattctgaaaaataagaaagtcggctcttaaaacagcaaggattcacgtttcactatcggaaagatattttaaaactcctcccctgtgttttgcaacgcaaaatataggggaggtgtccgaaggacggaggggttagaaaacatcggcagtaacaaatcaggtatcaccctctcccctgccgtgtcccgtggcattacggggtgtttccgttagggaatatagggggagtgcccgcagggcgagggggttaaaccctacaatcaaaaactcttatggaatcttacaactatttccctaaaagaggagaaatatatccaagaaccttttgcaaatgatcgaccttactccacttgatcttattcgctttaagaaatacattgaactcttttctgcttgattcgggcaagagcttcgaaacagattttttattggcattgacaatttcaccaccgacaatgaaacacaaccgagtagacaccggtaatgtctgcccgttttcacgctccacgcgaatcatatcgtaattgagattggcaataccgccgagttgcaaactcgacaaattatcgaccgccgaagtagacgacgatgtaccataagcccccgtcccttgtagcaaacggtcgaaatcgcccgtcgtcctacgaccgagaatcgcttgcggtgtctcgcccaatacctcgataaaaaaattctcgcaacgtacgaattcggtactgtcggcaaaaacaacccgaccgatatcattctgattatcgggacagtatatctgcgaaccattcaaataatgcaaatcgttacgcaataaatgaatgtttactttcgcctcccccttattccccgatttggaataaatagaagcctccataaaatcatcgaataaatacggccacatagtcgtaggctctcccgcccgaagcccaagagaggtaatcacccccagcaatccggcaaataacaatcttttcataagaataaatttataaacattcaaaattaaatttgtcaaaaacgactacaagttagtaattttatgttatttttgctcctaagaataggaatattttgcaaacacaatcacacaaatacttaacaatatgaaaatcaaacatctattgtgctttatcgcgctatgtctgttttttactccgggtaaagcccaacaacttagcgtaatgactctacgtaatggagcaacggtttacatttgggaagacaaaagtaaacccgatgtattcggtatgatcgctttcaaagtaggctcggtcgacgatcccgaacaatacaccggactggctcattacttggagcatgtcatgttcaaagggacccaaaccatcgatgcactggattgggaaaaagagaaacccatctatgaaaaaattatcgccaagtatgacgaacgagcagcattaagcgaccccgctgcccgcgaagccgtagacaaggaaatcaacgacctgacccgtgaagcagcccaatatgccgcaggaaatgaattttcccttttggtagaccacatgggaggacaaggactaaacgccagcacaggctacgaccaaacggaatatcacaattccttcccgccctcgcaactcgaaaaatggctcgaaatctattccgaacgtcttatagaccccgtattccggggcttccagaccgaattggaagccgtatacgaagagtacaacatgtataacgacgaccgcggatcgagaatgagagagttcatctatgaacaagcattcggagatcacccatacgcccgtcccattatcggtctccccgaacacttgaaaaatccccaattaagtaaactgatcgatttctataatacatggtatggccctcagaatatgtctatcattctggtaggtaacatcgatgccaaagaggcaataccgatgattcgcgataaattcgaaagagttccccgccgagccgagatacatcgggaaaagaaacccgtccgccaattcaaaggtcgcacggaaaagagcgcgaaaattttctattatcctatgctggccctcatttacaatggagttccttcgaacgacaaagatgaaatcgcattggacatctgctgcgaacttctctccaactcacaaaaaaccggtatcctcgacaaactgcaactcgacggcgacatcatgagcgtaggcgcatctcaaaatgccatgcgagatgcagggattctcatgatcaatgccattccctctttcgatgcgaaccaaaatcgttgggacagtcacaaatcggtagaaaaaatcgtattatcctcattgcgtcaactgcaaaacggggagttcgacgaagcgactctcgaagctatcaaacaaaacatgatacgcgaatacgacctgcaaatggaatcgaacgaaatgaaagcctatatcttagcctctcttttcaatacgggagccgatccgtcggatatcgtcaacttcaaagaaaaagtcaaagctgtcaccatcgacgaggtgaaagccgtagcaaaaaaatactttaacgacaattacctcgctttgaatattcaagaagcgaaaaacctcgacagcaaaggacaaaaactgaaaaagcccgattacaaacccatcgagacgaaaaaaggagccaaatcggaatatgctaaatgggtagaaagtataccggtcaacatgcccgaagtaaaatactgcgacttcaactctatccaacaaaagcaactcaacactcgcagcaaactgttctacaatctcaaccccgagaacgacgtattcacgatgactttgaaatacggcatcggaacgaaaaagatgcctaaactcgaatatgccgtcgccctgatgaacaacgcaggtatgctgcccgatatcgaaccgttggcattcaaacgggctatgggcgaattaaatgcaaattgcacatacgctgtggacgacaactacatgtatgtcatgatgagcggatacgaaaaagatttggtaaaagcctgccagcttctttccaaacaaatccttttccccaaactcgacgacaagcagttgcaaagcctcatcggtagcgcgttcggctctcgccagatggaaaaaagcagtatcgggacattggaaagtgccctcacgtcatatgtattatacaaggatagttcagactacctgcaacgcatccccactcgcgatttaatagacctttcgattacagatctgacgactcaattccaagccgccacgaattacgaatgtgaaatctattacgtaggtacggcgccgttcgacgatgtatatcaagtattgagccaaaacttgccgttgaaagcgcaagaaatgccctctacctctcccgagttacgtcctcgacaacaatataccgaaaatacgattttcttcctgcccaacagcaaagcgactcaaagtaaaatatacttctttatagaaggaaaaccatttgatgtaaaagacgatatattcatcgaagccttttcaagctactttggagctggattcggaagcctcgtcgtagatgaaattcgcgaaaaacgagctatggcatatacctcctacggtatcgtggggaccccctccgttgccggtcgaaacacgctatttcaaggatttgtcggcactcagggagacaaaacgctcgacgctatcgaaatttacatgaatttgttgaaagatatgccgtccacacccgaacgtttcgacgtagtaaaaaccaatatcaaagaatctatcctcagtgcgaaaccgggattccgttctgcaagtgccgtatatgaggcatggaaacgaatgggctatacacaagatccggccatcgacaaaatgaaaaagatcgaaacgctcaaattcgaggacatcatcgatttctacaacgaaaacatcaagggaaaaccggttgttatcgccatcgtaggaaatccgaaagatttcgatactaaggctctcgaaaaatacggaaaagtagtcaaagtttccgaatcgaaactattctccgatagcttctgataagtcaacgagcaaagaaaataaaatcttaaaaagcgagggtctcgaaatgccattcgagaccctcgctttttagccataacgcacccgccaatcccactcgctattcttagaagctgttttaaatttattccgagacagattgagacctatgttgaaacagattggagtccgagataggcagtcaatagcgggctattgacaaaaatcaagggattcaagatgccagacaggggcgcaatatggccggaacatacctgcttgaaatgataatattatttctctataaatttaaaacagcttcttaaataaacctaagaatctgtttaatgttccttttaaaccgataataatcgcccatcgattgttcttaaaaaaacaacctctataatgaaagtaaatatgaacataatgaaaaaaagtatgacaggagcatttttagcgttggcagccgtttcaaccgggaacatagagcctatggaagcctgtacacgcgccgtgtatatcggccccgaacaaatggtaataacaggccgtacgatggactggaaagaagacattatgtcgaacatctacgtctttcctcgtggaatgaaacgagccggatacaacaagggcgaaaccgtgaattggacctctaaatacggaagtgtaattgcgacaggatacgacataggaacctgtgacggaataaacgaaaaaggattggtggcaagcctgctatttttgcccgagtccgtctattcactgccgggcgatacccgtccggtaatgggaatcagtatatggacccaatatgtactcgacaattttgcaactgtgcacgaagctgtcgaagaactgaaaaaagaaatcttccgcatagacgctccacgcatgccgaacaatggacccgaatctaccctgcacttagcaattaccgacgaaaccggaaatacggcaatcttggaatatctcgacgggaaactgaatattcacgaaggaaaagaatatagagtgatgacaaactcgcctcggtatgaagaacaattagccattaaccgctattgggaagaaatcggaggactggtaatgttaccgggaacaaaccgggcgagcgaccgttttgtacgggcttctttctacataaaagcaataccccaaacgtccgatgccaaaatcgcagtacccagtgtattgagtgtcatgcgcaatgtatcggttcccttaggtataaatacacccgacaaaccgcacatctcctctacccgttggaggtcaatctccgatcaaaagaacaaagtatattacttcgaatcgacacttacccccaatttattttggctcgacttgaagaaaatagatttcagtccgtcggcaaaagtgaaaaaactcccgctatcgaacggagaaatttatgcaggcgatgctataaaagatttacgagacagcaaacctttcgattttctgtttcaaaccccggtgatgtaattcaccgggcattccacatcatagacatgaaacacagcataataaattgtacaaacactttaagacagacttccgaaatttacgggacgaatcaaacactaaacacgacgctccatttgtccgaagaaaaatttttcgtacttttacccgaaaatctgtgacttcaatctcgttccgatgaaactggacaaaaacaaagtattctcattcattcgtaaccggatctccgtcgggaaattatttcttgccatattcattattttcatcatcttcatcgatgaaaacagctgtatacaacgcataaaatacgatgccgaaatcaacgacctgcgtaaacaaatagcggcacaaaacgatacgaccgaatactacaaccgtagaatagaagaattgaaaaccgacaaaaatatcattgaacaagtcgcgcgcgaacaatatcttatgagtaaacccaacgaagacatctatctcatcgaaaataaaaaataacactataacacatacgataaatatgaaccagcaaacacgcaatatattattcatggtatcctccattgccgtcattataggggcagctatgcccttgttcatgctcaaaatgccgtgggttccatacatttatgctttcggagccgcaggcatggccgtttgcagactcacattccgttacaaagggaaaaatttccggttaaaaagactctaccacatcgaaacattctcatctctctttttggtagcctcttcatatttcatgttcaaagaagaccccgattggattatgttgcttactgtcgctgctgtcctacaattatatacatcgattctcattccgcgagtatcaaagaaagaagaaaaataagctactcccaaccacctcccttgccatgcccgtagcattgcggggtgtggcatataaaatcagagcagaagcgaaagggaaatacatctcaccctctcccctgccgtgccccgtagccttacggggtgttttgcatcgtaaaatatagggagagtgcccgcagggcgaaggggttaaaacagaaacagtagaacgaatttattgaatctgcaatgagcggagggttactctcaccctcctcctctgtgttttgcaacgcaaaatataggggaggtgtccgaaggacggaggggttagaaaaatatcgacagtggcagtaacaaaatcaagtatcaccctctcccccctgccgtgcctcgtagcatggtggagcaaggctcataaaatcggagcaagggcgaaagcggaatacatctcaacctctcccctgccgtgccccgtggccttacggggtgtttccgtaagggaatatagggggagtgcccgtagggcgagggggttaaaacagaaacagtagaacgagattattgaatctgcaatgaacggagggttactcttaaactcctcctctgtgttttgcactgcaaaatataggggaggtgtccgaaggacggaggggttagaaaaatatcgacagtgacagtaacaaaatcaagtatcaccctctccccctacctgtcccgtagcatggcggggtatcacactgcgatatagagggagcaggtttaatgcctttcggcccgcgaagcatctatccgcaacaaaacgaacaacaaaatagtaaatccccacagcgacgaccccccataactgaaaaaaggcaaaggtataccgataacagggcacaatcctataaccataccgatattcaccgccaaatgaaaaaacaatatcgagaccacacaataagcatatacccttccaaaagcagaatgctgccgttctccgatagctataagtctgaatatgagcgtgacgaaaagaacaatcacacccacagctccccaaaagccctcctcctcaccaatggtacaaaagataaagtcggtatcttgctccggcacatatttcaatttcgtttgagtcccattcagaaaaccttttcccaaaaagccccccgaaccgatggcgattttcgactggttcacattatatcccgcaccgcgcaagtcctcctccatgcccagtgtcactttaatccgtttctgctgatgagactccaacacttcattgaaagcataatccacagaaaacaggaaaatgaccgatacgacagccgttgccaagatagtaagaatcctcaacgaacgagtcgagaagtaaagaagcaccagataaacgacgacggcggccgtagtccccatacaaacatacaagagattaaccggtacatcgaaatacatcaaaatgccacataccgctcctaccgccaaataaccaagcatcaaataacgagccgcacgactgtttctctgataaaataacaacattccgaccaccaccaaaagaataagtacgaaaaccaacacttctccggcaggaatctccccccataatacactcgaatatttgacggcaaccacaaaatagaccacggcgcaaaggccatagaaaaggaacaatcccgataatccttcccgatacagaacgaatatcaacgatgcgaaaaccaacgccgaaccggtctccttttgagcgataatcaaaacaataggcaacaatatgataaaaaccgcacggaataaatcccgtctgtttttcaaagaaaacccatacgtcccgaaagaccgagccaaagcaagagccgtggcaaacttagcgaactcggccggttgtaaactgacaggccccaacaccaaccacgaacgggacccttttatatcgggggctaaaaatatggtggcgataagcaaaagtatgataatcccgtagaatagataagcataagtttcataaacccggaaatccaccattaaaatcataaaagccaatacgagcgacaaacctatccatatcaactgttttcccgaacgctcggcaaagtcgaatatactggcattatcgaaatcgtaactggcggcataaatgcttatccaaccgcaaagaacgagaatcagataaagaattaccgtcatccagtcgatagaccgccatatattaatgctttttgaccccactgtatatgattgtgttagattgcaacatacgctcttccaagtatttccgctccggtgcaatcttccggttcagatacatctccatcatcagacttccgataggtacaccatacgtagctccgaatcctgcattctccacataaacggcaatagctattttggggttgtccatcggagcgaatcccataaaagccgagtggtcttttccatgaggattctgtgccgttcccgtctttccgcacacctctatacccggtatagcacctatacggcaagtcccgccggttacagccatgcgcataccctctacgacataatcgtaatagtgagaatcgaccatagtatacttaggtgtagtaaactccggggagataaccgtatcctgtatctcccgaaccaaatgcggagtgtaaaaataccccctattggcaatcgttgccgacaaattagctatctgcaacggggtcgccaagacctctccttgtccaatcgcgacagatataatcgtcaatgcgctccatcgattttcgccatataccttgttgtaataattactattgggaataaagcctcgactctcacccggtaaatccacccctaaacgatatccataccccatcgataccaaataatctttccaaacattgaacgcctttgccggcgattgatattttttccgattatcgaccatcgaacgcaatccgtaacagaaaaacgcattacacgaagtttgcaaagccggaagtaacgataaaggtgatgcatgcccatgacagccgactttcaaccgtcccgacacaaacccatgataacagggataaagtgtatgctcggtgatgatcccttcgttcaggaaaataagtccctgtgtaggcttaaatgtcgatcccggcgggtatgcggccatcaaagctctatcgaacaaaggcttgtaccggtctctattcagtttcaaataatttctacctctctccctgccaaccagcatggagggatcgtaagtgggactcgaaaccatcgccaatatctctcccgtagacggctcgatagcaacgatagccccaatcttgttctgcattaatttctcgccataggcctgcaactcgatatccaacgacaaattcagatttttccccgaaacaggtgctacatcataacgcccgtcttcatatcttcctttaacacggccatgggcatcgcgcagtaaaatctccacccccttttctccacgtaaaatattttcgtaagagcgctctatccccaaatctccggtgtaatctccccgagtataataactgtctttctctatatctccgggagacacttcccgaatattccccaatacattcgcagccacagggtaagcatactccctgagcatacggttttgaatgaaaaaaccggggaaacgatatagtttttcttgtaaccgtccataatcttgcgcggacaactgggtcataaaagtctgaggtgtgtatgacgaataaccgggattcaacctccgatttttcatatccgccatgcgcttatcgaattgttccttcgtaatccccacagtccggcaaaaatcaagtgtatcgaaagggcgaacctctcgtacaatcatcattacatcgtatgccggttgattaaaaaccaataactttccattgcggtcataaataagaccacgagaaggatattgtgtttttttcaagaaagcgtttccatcggcgtgttgcttatagtcgtcgttcaacacttgtaaagaaaacaatcgcacgacatatatgcaagcaatcaccaacacgatgccgcctatcacatatttacgcctctctaatttatagtcttttctcacgtcccgatttcgttaaactatccattcccaatatcacaagaaatgtcaatatagtactggctaaaatacgaacaattaatcttcctatatcgaaaaagctaaaagactctattacgaaaaggagggtacagaaacaaagtgaaaatgtaagcacgtagcgcacaaacaaagacattccgaaattgcgtatagagggctccgattcgctataatcctcacccctcggcgtataaagattcaatatcggttttctcaaaaaggcaacgacggtacaagccaaagcattcatacccggcgtattgctgaatatgtcgattaccaacccaagaataaaagcaagcgttaaagtccaattaaccgagagcgatagaggtaacctgattataaaataaatataaagaaaaggaatggcaactcccaataaatgtatattattccctatcgtaacctgcaagaatacgactacaataaacaagaaaaaatatcgtaaccaactattcatatcgagcctccttttcaagtttatcctgttcttctttttgtcggttcgatataatgcgcacataccctaagccactaaaatcggaacttagctccacacgcaatgtatagaaattatcgtcacgctgctttttataatcgctgattatacccaccataattccttctggaaacacagacgaatagccgctcgtgacaatcgtatctcccggagcaaactccacatgccgaggcatctcctctaatacggcgtaacgaggactcaccgcatcccaaaccaaagacccgaaatagtcgctgccttttaccttgcaactgagacgcaacttagggttaagaaccgatatggccacggaatgatgttcgcccacaacattgataatacccacgacaccgttctgatcgaccactcccatctccggctctataccttcggctcgccctttgtcaatcgttatataattgtttatttgcgctacactgttattcacaacacgagccactgcaaaatcataatcatgaagtacggaatcgaaaggaatcgtatcttttcccacagaagacctataacgattcaactgttctttcagatttattacctccatctccaactctccgtttcgtaattgcaaatccctgtttacttctctcaatccaaaatatgaagttacttccgattgcaaatcataaacagccgatgccacttgattggccgacgagagataaatactgcgctgataagggtttcgtccaaccaacaacacgcaacttatcgctacataaatagcaagtactatccatgagctatgcctcaataaaaaattgattaagttgcgcattttcttattaattctaccacaacgagttacaaaagttttttttcacttttgtaactcgtctattctaaaaaacgacaaagcctgtcgatgtatcttttctgttaccgaatgaggaaggagaactggtcgatatttttcaatgcgacgcctgtacctttcgcaacagcatgtaacggatcttcggcgatgtggaacggtattcctatcttatcggtcaaccgtttatccaatcctctcaataaagcgcctccaccggccaaccaaataccgttacgcacaatatcggcatacaattcaggaggtgtatgttccaatgcattcaacacggcagcctcgattttcgagatagacttctcgatacaatgagctatctcttggtaagaaatggggacttccataggcaacgccgtcatacgattcggaccatgtacgacataatcttcgggaggattatccaattcggtcaaagccgaacccacattgattttgatcaattcggccgtacgttctcccactttcacattatgctgacgccccatatactcttgtatgtcgttcgtcaaatcgtcaccggctacccgtatcgaattgttcgacacgataccacccaacgaaataacggcaatttcggtcgtaccaccaccgatatccacaatcatatttccctcgggagcctgaacgtcaagtcctatacctatcgcggcagccataggctcataaatcatatatacatctcgtcctccggcatgctccgaagagtcgcgcaccgcacgaatttcaacctcggtacttcccgacggaatacctattaccatacgcaaagaaggcgagaaccaatgacttttggagctaaccatctttaccatacctctaatcatctgctcggcagcatagaagtcggctatcacaccgtctctcaaaggtctgatcgtgcgtatattttcatgggttttaccatgcatcaaacgagctttttcaccgaccgccagcaacttgtccgtacgtttatccagcgcaaccaccgaaggttcgtccaccacgattttatcgttgtggataatcaccgtattggctgtgcccaagtctatggcaatctcttgtgtgaaagaaaataatcccatatcggttattgattaaataatttatattagtgcttaaaatgccgtataccggtcattaccatagccatgccgtttttatcgcaatattctaccgaatcgttgtcacgaaccgatccacccggttgaattacagcagtcaccccggcctcatgagctatttccacgcaatcggcaaaggggaaaaatgcatccgaagccattacagccccttgtaaatcgaaatcgaacgaacgagctttctctatggcttgacgcaaagcatctacccgcgaagtctgaccgataccgctcgcacaaagctgacggtttttagccaacacgattgcattcgatttactgtgttttacaattttattggcaaacaacaaatcttccacctcagccggagtaacagctttctcggtaacctgcttcaactcttcgggcttttctcgatacaaatcgcgatcttgtaccaacaccccgttcagcaacgaacggaattggcgattcgacgctttgaacggtttctgcacgagaatgatacgattctttttctgttcaagaacttcgagcgcatcagccgtatagcccggtgcgatacaaacttcgaaaaagattttatgcatctcttcggcagtttctttatcgatcgggcggttcgttatcaatacccctccgaatgccgaaaccggatctcctgccaaagcagctttccaggcttccaccaaagtttcccgagatgccaaaccgcaggcattattatgtttcaatatagcgaatgtcgtatcgtcgaactccgaaatcaacgataccgccgcatctatgtccaataaattgttataggaaatttcctttccatgaagttgatcgaacatttcctcgaaattaccgtagaagactcctttctgatgaggattttcaccatatcgaagagtcttggcatgatttcccgcatagcggaatgccgaagcctcgtctccgtcgaaatagttaaatatcgcactgtcatatcccgaagatacggcaaaagcctctttggcgaaccaacgacgatcttccaacgaagagctggctcccttctcctttaacatagccaacaacggagcatactgagctttcgatgcgacgataacgacatctttataatttttagcagccgctcttatcaaagagataccgcctatatctatcttctcgataatagcactctcatctgcacccgaagccacggtttcctcgaacggatataaatccacgataaccaaatcgatagaagggatttcatattgagtgatttgttgctgatcgacttcattttcccgacggttcaatataccaccgaacactttggggtgaagagtcttaacccgtcctcccaaaatagacggataaccggtcagattctctactgaaccacaaggaatccccaacgactcaataaaagattgcgtaccaccggtcgagataaaattaactccttcggcatgtaaaagtttcaaaatttcgtctaaaccatctttatgaaaaacggagacaagagctgttttaattttcttattttcaagcataaagcatcgcactatataattcggttacaaaaatacaaaaatatataggtttagccttgtataattcatgaaagttttcatggaaaaataaatcttttctattcggctctttctaacggtgttatccttccttttatgaacaaaacagtgttcttattcgtttcgttttcctacaccgcataggtctaaaaaaatgatgtcttaactattctgcctatatacgacgaatcaaaaacataaactcaaatataaattattcaaaatgcttatggaaaaaataggaatattttacggctcaactaccggaattacagaaagtgtagcctaccgattagccgaactaatgcatgtaaaaaaagaagacatacacgatgtcgcacgaagcaaaccttcggaaataggacaatacgagctattattattgggttcttcgacatggggaagcggagatcttcaagacgactggtatgacttcctcgacggaatcgaaaccctcgatctcaaagataaaaccattgctttattcggttgcggagaccaatctatgagcgacaccttttgcaatgccgtcggcacaatttaccatcgactacaaaaaacaggagcaacattttacggagctttcgaagcaggagactatacattcgacaaatcgacggcctttatcaacggcaaattcataggattacttatcgacgatgtaaacgaacccgaaaaaacagaaaacaggctcaatcattgggtagagcttctacaatcggaatatattgtaacacagtaatcaccctcttatcttaaatatattattgaggcgggtatcgatacccgcctcaataattgtgatataaatagttgcctgcccataaaattaattatacatttgctccaaatattacgacttttaaaagtagagcataacatgcaattatattcggaaaaacgctcgattatgaacaaactgattggattacttacctgcttatgtttctccacaaacttggcggtagctcaaaataaagatgcatcatcaatcattaaattcggattattcgccgacacccagtatgctgattgtccgtcccaaaatacccgttattatcgggaagctctacaaaaattagatacatgcatcgagtatttcaaccgacaagaagttcaattcactattaatttaggtgatattaccgacaggaagaactccgatttagaagtaataaagcagcatctctcccaacttaatcataaaatttatcacctcacaggaaatcacgactacaaagacattacaaacaactctgtcctttacaagcagctgagtatgccttctgaatattattcgttcaaaaaaggggactgggtatttatcatgttaaataccaacgaaatcgcttcatacgccaatatagcgggaacacccaaagagaatgaatggaacaggatgcaagaacagataaaacaaatcaaaggcaaatatgcttatgaatggaacggaggaataagcgaaaagcaaatgcaatggctcgatcgactattaaagaaatgcgagaaaaagggtctttcggtcttaattttttctcatcacccgctatatccacaaagcgatttttcggcattgaacggcaatgaaatagtcgacaccctatccaagtattcttgtataaaggcagctttctcgggccatcaccacgccggggcattcggatattacaaaaatatccctttgatcacactggaaggaatggttgaaacagaaaaccaaaatgcctatgctatcgtcgaaatttcccaagatcacctacttgtaaaagggcaagggagagcatcttcatactcgttcaaattatcccgacaataggataactgctaacgattctttcgcatggtataacggctgattcccaaactttcatagcttttacgtagctcctcatcgttatctgaaatcaccagaagacggtctccactctgtaaatgagtatgtcctttgggaacaaaatattgttctctgcgcttgaccataacgaccaacgtattatccggcaatgaaagattcattagtttattacctcccgataaagcctcgtccgtcaactctatctcgctcatcgccgattttatttcatcgggtagagcgacattaaagatttctttttcctcgctcttccccaccaatcccagccatctggccatcgcacttaccgtagttccttgtaccaacaaagagacaatggtcacgaaaaacacgatattgaaaatcatacgagcattaggaatttctgccgacataagcggataggtcgcaaaaataataggaacagcacccctcaaccctacccatgaaatataaacacgagcccgagtcgtaaacctacggaaaggcaataaacatgtaaatacagatatcggacgcgagacaacaatcatgaatatggcaaccaacaatcccactccggcaacagcaggcaactccgaaggattcaccaacaatccgagtgttaaaaacatgactatctggaaaagccaagtaaaaccatcgaaaaatgtagtcaaactacgcttgtgcaccaacttccgatttccaacgactaaacctgctatatagacagccaaatatccgttcccttgcaaaagattggtaaaagcgaatacgaaaaaaacacaagagaacaacaataccggataaagcgattcattagggacattgatacgatttataatccaaacaatagcataccccaacgcaaatccagcagccgcacctatcgacagttgcataaaaagcagaacgatggaatgaggccaatcgataactccaatttcaataacctgaatcaaaagtatcgtaagcatataggccataggatcgttactaccgctctccaattcgagagtcggccgcaaacgctctttcaaagaaatccccttcgaacgcaaaatagaaaaaacggatgccgaatctgtcgatgacataacagcagccaacagcatggattctaacaatcctaactgaaaattacccggcaaaagatcggacaacgaataaatgaataatcctgttataatcgttgtcattaaaactcccaacgtagccaaagtcacacccggagctaaaattggttttatttcccgatagtgtgtatccattccacccgaaaacaaaatgatacaaagtgcaaccgtacctataaactgggctatttgaggactatcgaaataaataccgaaaccgtctgaaccggcaagcattcccacaccgaggaacaatagcaacgccggtacaccaaatttcgctcctgtttttccgacaaggacactcaggaacaataaaatggctcctaccaacaatatattttcaggactgataaccatagagtttatttactaagaagctgttttaaatttattgagaaataatattatcattgcaagcaggtatgttccggccatattgagcccctgtctggcatcttgaatcccttgatttttgtcaatagcccgctattgactgcatatctcggactccaatctgcttcaacataggtctcaatctgtctcgaaataaatttaaaacagcttctaatatttcaaaaacgaggtaaatatacataaaaaatgtgattttaccaattcttcacaattcgacaagtaaacagaaaccatcatttttcatgaacaaaaaaaggagaaaagtgtttaatcaataatagctttaataaacaaaatcttcctaaacatgataaaatcggacataggcctcgtaggactggctgttatgggtgaaaatttagccctcaacctcgaacaaaaaggttatcgggtatcattatataatcgattgcgggaaaacagtccgcaagcggtagattcatttctcgccaataaagggaaaaacaaacatttcatcggtacacactcgcccaaagaatttatcgaatcattgaaatcccctcgaaaaattttacttatgatacgagccggacaccccgtagacgaaatgattacaacattacttccctttctcaaaaaaggcgatacaatcatagacggcggaaattcggattatcgagatactcaacgtcgtgaaaacgaattgcgggaaaaaggaatattttttgtaggctgcggtatttcgggcggagaagaaggagctctccacgggccatcgattatgccgggaggatcagacgaaatcaaaaaagaaatattacccgttttacaaaacatagctgtgcatctcgacgacgggactccctgctgctcatggatcgggcccgacggttcgggacacttcgtaaaaacagttcacaacggtatagaatacggagatatgcaactgatagccgaggcgtattccctattgaatattttgcaaaaaggagaccatgaagccactgcccaaactttcgaatcatggaacaaaggtgttctggacagttatttgataggaataacagcacccatattacgatataaagataccgacggtaaatccctaatcgacaaaatagcagaccgtgcgggacaaaagggaacaggaaaatggagcatagaggctgccatcgacagcggaaccacgctatctgttactgccgagtcggtttttgcccgactcttatcgaatcgcacaacagagcgaaacaaagcacatcgtttataccccgaaaccgatccggctccgatattcgaacttagcgtagacgacatacatcatgctctttacgcctccaaaatcatcgcatatacacaagggttcgatttattgtacaacatgtccgaaaaacataactggcagctcaacctcgccgatatagcgactatatggagaaagggttgcatcatacaatctcgatttctctacgaaatagctcaggcttacaaactgacgaatgaatacgaaaacttactattcacaccttatttcagggaaaaaataattttatgtctcccgttttggcggaaagtagttcaaacggccatagcagcagggatagccatacccgggacagcctcggcattagcatggttcgacggttttagatgtaaaaaatcatcggccaacctgatacaagcgcaacgagactacttcggtgctcatttgtatgaaagaatcgatgctccggcaggtacgttttttcacaccgactggaaccgacacggagacggaacgacctccggtaactattctctataaaaacaaacaaaaaatttcgatatgaacaaaatacccgaaagccaaattctgattatcttcggagcatcaggtgatttaacccatcggaaactcataccctcgttattcgagctattcgaaaggaaacttcttcccgacaaatttttaatcgtaggtgtttcccggacaaaacaaagtactgaagaattccgacaatccttgcattcatctatcattggtaacggaaagacctatgccacggataatccttatctaaaaaacttcctcagagaaatatactatatctcttgcgatactaccgactgcaatgcatacgtcgctttattcagagaaatagaacaattgcgcaatgccgccggcatagaagataacatgttgttttatctcgctacgccgcctcagatgtatgcaactatccccatctgcatacaagcccaacaacaaaacatctctaaaaacggttggcggagaatcattatagaaaagccgtatggaagtaacgaagatgaagcgaaacaactcgacaaattattatgcggaatattccccgaacgagaaatctaccgtatagatcattttttgggaaaagaaactgttcaaaacattttagtcctgcgcttcgccaacagcatttgggaacctctttggaatcggaattacatagaccacatagaaataacggccaccgaaaccttaggagtggaacaacgaggtaattactacgattcggccggtgctctgcgagacatggtacaaagtcatctcatgcaaatcatggcatttatcgctatggaaccaccctcctctttcgaaaccgaagcaattcgcaatgaaatcagtaaagtattccggtcattacgtccactctctcccgacgatatagcgcataacacactgcgggcacaatactccgaagggaaattaaacggaacaaaacttcccggataccgagaagaaccgaacgtaaataagcaatcgacgacagaaacctttgtcgctctaaaattatacatagataattggcggtgggctcatgttccattttatatttatacggggaaacgattatccgaaaagaggtctgaaatcatcatacatttccgttccacgccacaggcattatttccgggacaatgttgcggagactcttgcaatcaactcatcattactctacaacccgacgaaagcatccggttacgtttcggtttaaaacagcccggaaccaacttcgaggtacagcaagtgagcatggattttttctacaactcacttatcccgaataaattaccggatgcttatgaacggcttcttctcgatgccatgcgaggcgacgctctactatattcgcgaagcgatgctctggaactgagctggcactatttggcccctctcatcgaccactgggaaaaagaaaaagaagagaatctcgtattttatccggccggtagtccgatacctcgcgagattacccatatatattctcacccgtatgtgctcgaagcacctgtttgcacccccaacccataacataataaacaacatcatgaatcaaaccatcgtacaattctatccagacgcaactaaatcgctgatagccctcaccaacgccttactcatatcggctgccgcacgtacaaagaaacctttttacttggccctatcgggaggagagacagctcgctcacttttcgaaatatggaaaaatcaatataatgatcccaaacggtggaaaaacgtacatttcttttgggtagatgaacgatgcgtatcgtctgaaaacgaagaaagcaattatcattgggctgaaaaactgtttttcaaacccgtaggtataaatccgaaccacatttacagaatacaaggagaagatattccctaccgagaagctgaaagatactcccgattggtcgcagaaatgctgcccgacagtaacggagtaccacaattcgactgtaccctgctcggcatcggcgaagacgagcacatcgcatccatattcaataacgataccgatttattaaaatcggacgacctttatgctgtgtcacgacacccggcaaccgggcaaagacgaattactcaaaccggagaagtcattttagcatcccgtgaaatccttatcgctctggtgggagaacgaaaaaaagaactgctccatcggttagtagccagaaaagatcaaacgattacccctgctacatacatactttcacacacttcacgagcaactatattcaccgagatagaactcaatagcaaagagttgtcattccaataaatccgggcgtaagcgtcgggtacgttcgagtgactgctcgtgtttccattcgtcgattttacgttgatgtcccgaaagcaacacatcgggaactctccaacctttatattccgccgggcgcgtataaacgggcggagccaataaattgtcctgaaaggaatcggataaagccgactgctcgtcaccgatagctcccggtataagacgcacgatagcatcgcacatgatcgcagcggccagctctcccccggtgaggacataatctcctatcgtcacctccttcgtcacgaaatgttcccgtatgcggtaatcgatacctttataatgaccgcacagaataatgagattacccgccatcgacaaacggttagccataggctggtcgaatcgctctccgtcgggagttgtaaaaatcacctcatcgtaattccgctcgcttttcaattgagtgatagcccgatccacaggctctatctgcatgaccataccggcctctcccccgaatggatagtcgtcgactcgccgatgtttatccaacgagtaatccctcagattgtgaaccacgatctcgaccaactttttatcttgggctcttttcagaatagaataattcagcgggctttgcaataactctggcaatacggtaataatatcaatgcgcatcatagctctcaatttgccgacaaaagtagccttttctaacgggtttcacaaatagagaaaatttttatcccagaagttaagtgctgctcgaatttgttttgtaattttgccatacgttgtcaaacgcagataacatgcataccataggtaaaatattgaaaactatacgggaagaacgtgggttacaacttcgacaggtcgctatcgaatcgaatatcgatttgactctgttgagccgtgtcgaaaatgggaaacgaatgccttccgagagcttactcatcaaattagcggaaacttacgggctcgacagtaacctgctagtcctgcaattagtaagcgataaaattttagaaataagcgagcagtatcccgaccataccatcgaagccctgaaagtcgctcaggaaaaagcccgactcggagagcgatacatctcgttcttcatgaactcgttcatatctcgccccatcgggctggaaagccgccgttacattggaaacaaaaccaaactgaccgattggatcatggaaactattcggcgggaatgccccgaggcgcattcgttctgcgatatttttgctggaaccggtgctgtggccgggaaagcaataccctattacgaccaagtgatattcaacgatttgctttgtgccaaccgagtcatctatcaaggtttcttcgaaaaaggagaatggaacagggataaattatgtacaatcctcgacgagtataatcacaccgattacaactctttggaggataattatttttcaataaacttcggcggtaaatatttcgattatggagtttcgaaactcatcggatatgttcgccagaacatagaagaccgtcgaggagaactcacagacaaagaatataacattctactctccaccctcatttacaatatggatcgcatagccaacaccgtagggcatttcgatgcctacatacaaggaaaggagatagaaaaaaaatccctcaccctccggttaatagacgctcgaagctatgacaatgtagcaatttaccaagaaaacagcaacacgctggctcgaacactgcatgccgacatcgtctacatggatccaccctataattcccgccaatattgcgatgcctaccatctctatgaaaatctggtccgttgggaaaaaccggaggtaaaaggagtagccggaaaattcaaccaaaaagacaagaaaagcgacttttgtaccatgaaggcggtcgatgctttcgccgacctcgtcgacaatctacacacgagatacattgtactgtcatacaacaacatggcaaaaaaagggaatgggcgatccaatgcaaaaatggacgataccgacatcatgcgtatactcgaagccaaaggccgagtacaagttttttcccatgaccacagaccatttaccacgggaaagtcgaatattaaaaaccatcaagaacgcctatttatatgtgtatgcgacaatcactagactttccgaaccggatacaatcacctctcaattatacaggtggaaaattcaggctattaccgcaaatcctgcccttgtttcccgcaaacatcgatgtgttggtagacctgttctgcggtggcggtaacgtaggaatcaacacatcggcagagagaatcgtcttgaatgactcggacaagaacgtcatacgcattttcagattattccggcaataccccaccgaacagattttagagataatcgacggcatcatcgaccggtacggcctgtcggacagtcgcacgaacggatatgcgttttaccaatgcgaaagcgcgagaggtttgggtacatataacaaggaaggatataaccggctgcgtagcgagctgaataatatgaaaaggaggaacgaccgttatttcttcatgctgttcaccctcatcgtgtttgccttcaacaatcaaatacggttcaacgaaaaaagagaattcaatcttccggtggggaaacgcgacttcaataacaacatgaggaacaaagtgaggcattttgccgaagccatcaaaaatccccatatcgaactgtcgtccaacgattttcggagaattccattcgatgggctgtccgaacacagtctcatttatgccgatcccccttatttgataacctgcgccacctacaacgaaaataacggctggaacgcccggctcgaaaaacaactgctcacttacctcgaccgggcgaacgacagaggaataaaattcgccttgtcgaacgttctgaaaaacggagacaaagaaaacacgatattggccgaatggttagaacggaatcccatgtatatccgtcacgatttgaattacaattacagcaattcgagttatcacaaaaaagacaggagcaaacattccaccgaagtactaatcactaatttcgaatgaagtatgtgtacatataaaagctattgttggtcgatgggaaccacgagtttcaggactgccgatttcaatcaaaaaatcgaaagacaattgactcttctttccaagttttgggaggttcataccgatgtcgtttggtcggggaacgacgagatacaatctttgtactacgacttcatgaaagacaacgattttcttaccggcgatgcacccaacaaacccaaagatgcccgggaaaaaacatcggggttgattgatttgggattgatcgataacgaacgaagaccgactgccgccggagaatcattacgacaaatcacctccaacggagatttccgaccgaataatctgctgcaaattccggccgatagctacatttatttcaaacagatgctcaaaacgagcaacgacgtagacggtgaaatcgtacgaccgttcgtcgtactggttctcgctttgaaacagctggaatatctcacacaagaagagttcacctacctgctgccactcattaccacttcccgaaaattcagaacaatcgtcgattgcataaaacgattgcgaaaaggagatatcacaatcgacgaaatcatcgtcgatacactcttgacgatggagaattaccgggaagcgaggctatatcttttggagagaccggtatccgaacatgtgatttgccaagcgggaatcaaccgcaaaagtcgtcaatacgacagcacatactacccgctctaccgcactatcgagtcattggatagaaacaacgctcaatccattctcgatttgttacaagcctgccggaacattcgcatcggtgcgttgtggtgcaaccaccttttcaaaacgacgaacaggggaaaaataaagaaattactatccgcctcgctcaacgatgttcccatcttgaattgccgaaacgaatctgaattgaaagacagattcttccgattgatgcatctcttcaaggtaaaagccaatttgtctgattatttcgatctgaaccgccgatatttcgggacgaccgataccgttcttttcaaagacaacagggtagaactctcccccataccgaaatgttttttcgacctttgtgccgaaaatctcgaagaaatcgctttcacgacctcaccgctcctgcccctcgattgcgacatcgaaaaaatcatacctcgctatgatatcgaagaatccgacctgcatcgtaaactggcagacaagtatggccttgccccgcaatcgctcagcgacattcgcgcctttctcgacgacgagcgccacgagcgtttcaaccggctcatcgatgcccgttttcccgaccatgtcctgttggaactgttgtctgacttcgaaacccgcaacgacatcaatatccgcaggctcgtcaccgacaacgccgatgtgcccaccattttcgaatacatcgtcggtatcgtctggtacaaggtaagcaaccgcaaagggcgcattctggattacttcaacctgtcgttagatgccgatttgcttccgaaaacacacgccgccggtggtatggaagacattacctatcgatacaatgccactcccggttacccggagcacacactgcttatcgaagcgacccttgccgaggccggcacacaacgccgcatggagatggaaccggtctcccggcatttgggtgacttcctcttacgcgacaatcggcaggaagcctacgccttgtttgtcaccccgttcctgcatctaaacgttatttcggatttccgggggcgaaaacaaatgccctactattcaagcgatggagagcagtgcattaacggaatgaaaatcattcctttgaataccgccgaattaaaaaacatcatcgcaaattcgatgacttacgaccaattatacccgctattcgagtgcgctcaccaaaacaatgagcctcccaaaacatggtatgaaaacaacattatgcgctctctacaaccgaagaaaacctccacagggatattaggtacacttttttgaatcactctttatgaacaaagggactcaattattgtgcatttcacagtataaaatttgtatctattaaatctaatttttatatttgaaaactcacaaatatacagaaaggcgagcgcaaaggcaaaccgaaatctcatttccgatttgactatgccgagccgcatcctatattctacaaatatatagaaaccatgagagtaaaggcatttatattcgtcgttttgattctactcggagggaagattttcaccgtcgacgcaaccgaaaaacataccatagatattgtgggtatagaactcatctcaccctaccgctgtaatctcaccatcgggtttaagtcatggggcgatccgttctattctttggatataaggtcccccgatttgctctacatcaccaacgaaaatatcaacccgaaagactacgaagataaaagctacataacatataccataacttcgctatttaccgacactgactatgagtttgtaataacaagttacggagaatttgcagcaaagtcggaaatattgactttcaactcccacgattttttaagtaaaatccaagttaacaacaacgagattccccgatcgggcatcgtctattacgaacccaatcgtaaataccagtttgaatgcatcaccgatttcccggcggaaaacttccaatggagcttcgaaatcgcccaaaaagagggaggtccaaaaatcatcgcgaccggcgaaagtccccaattcccaatcgaaatacccactgtggaatatatggacaaacggaacgatgacggtgatgtcatttgcaatatttactgcaaaacccaatatggaggaataacctatgaaatcaactaccctttctttatccgcacataccccgaccagccgaagatcgatattctcgatgtaaaggtacaggatgcacaatcttgcacactgactgtgggatttcatgcttgggatgcaaaaacctatacgataaaaatcgtcgacacaaacagagataagatttgggaagacaacctcgaagacaacatcaacaatagttataccacgtacaccttcgacaaaatatatatcgataccaactacgaaataacggtatggggatttaacggttccaaaattttaatgacccaaactctatatttccgtatgaacgaccacatgggtatcgagaaaatagaacaggacgaatttatcgaatcgggaactatctttaacctgcaaggacaaatcatcggccgatttaccgaaaaccatcgggacatattcaccgaactgcaacccggtatctacatcataaacggattgacctctaccgggaaaaaagtcaaccgtaaaattatcgtcaaaagcccttcctccccgatatgatatagaaaaactatcctgtcccggaataaacctcataaaaaacaggacttttcatatctcgaaaaaaagagctacctttgccaatcgaaaaaataagaaccgggtctcggcactatcgagcgatattcgtctctctccccgttccacccggtaaacacgaaaaggtaaaagatgataacggttaacaatttaggtattcaatttggtaaaagagttctttttcaagaggttaatttaaagtttactccgggaaactgctatggcattatcggagctaacggagccggcaaatcgaccctcatgcgtattttgagcaatcaactcgaaccctctcacggtactgtgactctggggccgggtgaacgcctctctgtattgagtcaggatcactttgcattcgatgaatttaccgtcatcaataccgtgctgatggggcataccgttctatgggacatcatgcaggaaaaagatgccttgtacgccaaacccgatttcagcgatgcggacggtatccgcgcagccgaactcgaagagaaattcgccgagctcgaaggttggaatgccgaaagcgatgcagcttccctgctcagcggactgggtatcaaggaaaacaaacactacatgctcatgaaagatttgagcggtaaggaaaaagtacgggtattgttggcaaaagcattgttcggtcacccggacaacttgctgctcgacgagcccaccaatgacctcgacctcgaaacggtgatgtggctcgaaaactacctcgccaacttcgaaaataccgtattggtcgtttcgcacgaccggcacttcctcgattcggtatgtacgcacaccgtagatatcgacttcggcaaagtacaacttttcgccgggaattacagtttctggtacgaatccagccagttggctctgcgtcaacaacagcaacaaaacaagaaagccgaagaaaagcgaaaagaattgctcgaatttatccagaggttcagtgccaatgtcgccaaatcgaaacagacgaccagccgtaaaaagatgctcgaaaagctcaatatcgaagagatacaaccttcttcccgccgatacccgggtatcattttcactccgtcacgggagccgggtaacaaaattctcgaagtcaaaggactcgcaaaatcgatcgaagggactctgcttttcaaagacgtgaacttctccatcgaaaaagacgacaaagtggctttcatctctcacgatcctcgtgctatgacagctcttttcgaaatcatcaacggcgaagcgaaagccgatgcgggaacctacgaatggggacaaaccatcaccacggcctatctgccgctcgataacagttcgtttttcaatacggacatgaatctgatcgattggttggcacaattctcagaggacaccagcgagctgtatctcaaaggctttctcggtcgtatgctcttctcgggagaagagttgctcaaacaggcgtccgtattgtccggaggggaaaaaatgcgttgtatgatcgcccgtatgatgttgaaaaatgccaacaccatgatactcgattcccccaccaaccacctcgacctcgaatcgatacaggctttcaacaatacgctgcaaggattcaagggtaatgtgctgctttcctcgcacgaccacgaatttatacagaccgtctgcaatcgtatcattgaactgactcccggcggtatcatcgacaaaatgatggactacgacgattacatcaccgatgaaaaggtacaagccgcccgcgaacgactctacaatttataaaaacatattttcggtatgataaaacatattgtaactttcaaactgaccggcactccggcagaacgcaaagaggtagcgaataaattcaaagatgctttgatggctctgcccctaactatcgacgtgcttaaaagtatagaagtgggcatcaatgaaaacccgtccgaaagttgggatatcgtacttactgcggtcgtagaaaaaatggaagatgtagaaacctacgcaaaacacccggcccatgtagccgctgccgcactcctcgccggacataaagccgacagggcatgcgtggattacacatactgataaatttccaagctattcttcttaaccctctcctaagaaaccactgtttcttaggtgttttccctatatcgttaacgcgactccccataaaactacgggacacagcaagggagaaggagagtactataaaaaaacaagagcgaaaatcctgatcggttttcgctcttgatgtattttaccaagccgtattcatttatcacggcttgtgctttcttctaaaatcaggcaaccgcagctgccaattttttttgtaataaggctgttaactcttggcacatggcgccatttcccattactcgatacttcgctatctgataccgaagcatctctactgtcatttgttctttcatcataattcagctttttttgttttccaccctttgtgaaaaacggattctttttactctttttacgctacaaatataataacaaattcgcaataaatatgttttataacataaaaaaacatattgcttttttatgaattatatatttccattcgcttatttcaacattaaaaccaaaccataaatatctaattatcaaaaatttattactatttcaagaaagattttccgaaccgttcatttttttataattttgttcgattaaaataataacaaaatatgcccgtaaaaataccttcgtcattaccggcagtcgaaatattaaaggccgaaaatatatttgtcatggacgatttgcgtgcttcgacacaagacattcgtccattgaagttgctcatattgaacctcatgcctttaaaaatagttaccgaaaccgatctattacgcctcatctccaacacgcctttacaaatcgaactcgatttcatgagcgtttcgggacacatctcccggaatactccgctcgaacatatcgatacattttataaagacttcgacgaaatacgcagtcaaaactacgacggcatgattatcacaggcgcccctgtcgaaaaattacaattcgaggaggtcgattactggaacgagttagtcgagattttcgactgggcgcacaaacacgttacctcgactctctatatttgttgggctgctttggccgggctgtaccatttttacggaatccccaaatacccgttggataaaaaacttttcggagtattcgcccatcataaatacgacgagcgaaatcctattttcagaggattcgacgacttgttttacgttcctcacagccgatattccgaggtacgccgagccgatatcgaaaaggataaatccctgacaatcctttccgagtcggaggatgcgggtgtttatatggtcatggctcgttgcggcagagagtttttcatcacggggcactccgaatattcggctctcacgctcgacatcgagtatcgccgcgatttggcgaaaggcctcgacattgccctcccccgaaattactatcccgacaacaatcccgataacaatccgatcgtcaactggcggggacatgccaacctgcttttcacgaattggctgaactatttcgtatatcaacaaacaccctacaacctgaacgatatacaatgaaaaccgtacgtcgcatagaactattagccccggcgaaaaacgtcgaaatcgggcagcaagcgattctccacggcgccgatgccgtgtatatcggcgcgcctcgcttcggggcacgctccaccgcaggtaacagcatcgccgatttaacccgactcatcgacttcgcccatcgattcgatgcccgggtgtacatcacattgaataccattttacgggacgacgaactgcgcgacgccgaacgactcattcacgaattatacaaaatagagtccgatgcactcattgtccaagacatgggtatcacccggctcgacattcctcccatagctctgcacgccagcacacaagccgacaaccgtacacccgagaaagtaaaattcctcgaacaatgcggattttcacaagtcgtactggcccgcgaactttcactggggcaaatcaacgagatagcccgatcggtacaagtcccgctcgaagttttcgtgcatggagccttgtgcgtcagttacagcggacaatgctaccttagcgaagcgatgtgcggacgcagtgccaaccggggcgaatgcgcccaatactgccggctcccctataccctcatagatgggaaaggcaatgtcatcgccaaagacaagcatctgctctctcttcgggacctcaatcaaagtgacagattggaggagcttctcgatgcgggtgtatcgtctttcaagatagagggacgactcaaagacatggcctacgtaaaaaactgtacggcctattacaggcaggaactcgacaagattttcaaacgccgtcccgaataccgtacagcctcgaccggacactcttcgatagaatttacaccccagctcgaaaaaagtttcaaccgaggattcacccactattttttggacggaagaacgcccgaacctatcgcctcgcccgacaccccgaaatctttgggtgaatacgtaggaaaagtcaaacaatccgataaaaacacatttacgatcgccggactcacttccatacacaacggagacggactatgcttcgccaataacaaaggggaattcgagggtgtacgggtaaatcgggtggaagggaaccgaatcttcccggcctcccgaatcgagataacccctcacacggttctgtatcggaacttcgatttcgagtttgacaaacgactctcccgtccttccgccgacagaagaatcgatgtagagataaccctctataccgttcccggaggatatgccctttacatgaaagacgaatgcggcaatcacacgaccatacgggaagacgcaccccacgaaaccgcccgaacccctcagcaagaaactcaaaagaaacagctcggcaaattgggaacgaccgcctactcggccctgaaaatagacatcgacctgcccgacaatttcttcataccggcctccgtactttcaaagctcaggcaaaaagcggtcgaatccctcgaccgtatcagacgtattgcctaccgaaccgagaagcgacaagaggaagacaaaaccgtatgttatccccagacagagctatcttacctcggcaacgtatctaaccgacttgccgaacaattctatcgcgaacacggggtcacccgcatagacccggccttcgaaataaaaccttcgaagggagttcccctcatgttcacccgtcactgtatccgtcatatgctgggaatatgcaaaaagacccccgccggcagcaaatttcccgaccccctcaccctattgtataaaggacaaaagcttcaactgcatttcgactgtacggcatgtgaaatgaccttgtacaaaaaagacattttatagctcagtcctatacatcgttcaaaaaagtggctatatttgcaaaaccttatcatttcgatacatgacaaaattcaacacctatctcgaaagtaatgatttcgaccgattaaagcgattcttcgaagaacacggggagctacaacattatcgaaaaggtaatttttttgcaagacaaggagagtattcgtcccaagccgctctaatcaaagatggcacattcgcctatactcacatcgacaatgaaggaaaggaacattacgtggggtttgtcttccccgacgaattcgtggccgattatacctctttcatgcgacactcggcttcacaggtgaacatcgtcgcattgaaaccctccacgatattttctgtaaaccgacaagcattgcacgatttctacaacaccgatatggaaaccctacgctataactgcctcatggctgaaaacctttacgaaatggtttattcccgcctattggaaagttactgcaaaactcccgaagagcgatatcggagactgacaacccgttatcccaaaatagaacaagaaataccgctgtgtaaaatagcctctttcttaaacgtcacccccgaaaccatcagccatatccgaaataaaatagttaaaaatagttaattaaaaaaagggggggggtaattcttgaattcattcaagaattttcttctaaatacgttctttttttgcagaatatttaatactgcaaaacatgaaaaagagaactttgctattcctatcgattcttgcgacaatctcctttacttcgacagcagagaacctacgcgaatccatagcgatcgttcgacccaatttcagtgaaagtacccaaacattccttaccgatttcagcaaatcgttacgtaaagacggattctatgcggcagccgacattttgcaaaattacgggaaagggtcgttcgggaccggatttgcctaccgggataaacgagacggtcggttatacatcatcaccaaccgtcatgtggtagaacaagccgaaaccgtcgatgtcgaattttccttaccgggcaacagttccaaaacattcgcgacatgccccgtagtgggcgtgcacgatgacttcgatgtcgctttcatcgctctgccggaagaggtcaatattcccacgctcgatataacagacaagagcataaccgacggcacacccgtattcagcgccggattccccgcattgggagacaaaccctcttggcagctggggcaaggaatcgtatcgaatgccagtgcccaaatcaaatctctgaccaacggaaaagaactgcctttggtgcaacacacggcacaagtcgatgccggcagttccggcgggcccttacttataagagatgaaaatgcagccgcaggatttgccgtggtaggaatcaatacgtggaaagcatccgaccgggaaaataccaattttgctattccggtacacgccatcgacgatttcctgaaaaattattccaccgatccgcaatccctgcttacccgaacagaagtcacgaatagagcatcggccatgctcaaagcagcccaatcgtcctatcaggcagtcatgccattcgtttcatatcggtatgtatcgaacatctcggccaacacgttttatgatttggtcaatgcagcctccgatgctgccacagatgccatgaaatcgtgcttcgagcaagggcaaccgttggagggtatccgtataggattgtccgatattatctgtcgccagttctccgggagaaactatactttttcgaccgtggccgctctcgattccatcggcaggaccgccgaggctatatataccacaggcaacaaaaacatctccacccgatggatcatggagcaaggacgctggcggttgagcgctgcggaaaatatcaaagccagtcgaatcgagcccaacggtatctcaaaaagttacggattcggcacatcgatctatatagggctcgtttatcctttcaataatgatgcgttcgacatgtcgtacaacatagcgttcaaacgcaccatactcacattcatgacctacgaagtcaccgcctctcttctaaaagtcaaaaccgaaaagacagaatgggaaggagctaatgaaatcgtaaagccccattcgcacaatgtcttcgacctcgaccttaatatcggcggacaattacccgtcaaatgcggccctatctatctcgtcccgtatgccaaaattttgggcgggctttacttcggatccgatttaaccggtatcgattacggattcggaaccggtgtggaaatagcctacaagttcggttatcaaaattatgtattcgccaacataggttatataggcaaacgcatgaagcccttcgacgacgaggaatttcgcctcaaatcgaaaactctttcaggattggcgttctcgataggaataagtttttaacgaatcactttatccaaaacacatacaatatgaaaaagattttatggctatgtccgctaatgttgctgatgatggcattcatcggctgcgacgacaaagaaaaagacgatgacgaaagtctgggtggtcaattatcagaaaccacatgggcagcagaagtaaaaaagtatccgttcctcaccaatttcccggagtacgacggtgaattggaaaaccaccgctacgacgatacctatggaatattacaatatatcataatggattacaaatgtgaagaatcgcttaaaaccaaatattgcgccaaactgacagctgccggattcgtggacgaagacggttatgggatttataaaaagacaaccacagaatacaaattagcagctattatctcgtacggaggaggcacgttggctcttagtttaagtgcagaacctatccaatagagaaagagaaacgcactcgatcgctctcgaagcatgcgataaaaagtccgattgaggtattttcaatcggacttttgctatttctattccatgaacgaacgaccatcacgaaaaggtcaccccatcgccccgctatttctctcccaaaacacaccgtcccggtagccctgaatcgtcttgttcccatcggcaagaagcagacgcttcgccgcccataggcaatactcttcgttaagctctatgccgcaaaagttccggttcaactttttcgctacgacggctgccgtcccgctccccataaaagggtcgaaaacaacatcgcccacctccgacgaagccaaaattaatttggcatacaacttctccggcttttgtgtaggatggtcggtattctcgggcatagaccaaaaaggtatgcttatatcgtcccaaaagttcgaaggataagtagaacgaaaattcccctgttccgtacactcccagtctttcggttgtccgttctcccgataaggagcgattacccggcgtctcattttcacagcctcgacatcgaaataataattcttacgatccttcacggcaaaccaaatatcctccattccgttcttccaattattccttgctccccgacctttctctctttgccaagttattcggttaaggatagagagaccggctctttcaagcacagtttgcaaagccgatgtggatttccaatcgccacaaagatagagagaaccgtccggcttcaacttttcgcaaactttataaaaccaagtttcgagataaccgatataagccccgttatccatagcctcgaacttcatgccatgaaaatctttcgtcagattatacggtggatcgataatcgccaagtcggcgaaaccgttcgggattcgatcgataatcgccaacaaatcggcatgtattattttattgagtacattttctccccgctcgatatccgataaagtcgagaccagatccctcaactgttccacctcctcgcccgtaacagacaatgttctgtttctaccggcacgtttccgttcttcccctctcatactattcactcgatatattttccaaatgcgttatcaaaatccggtaaatcggattccgagacaacagtcgcgaatttcccaaaacgaaaagctgacgccgagcacgagtcaacgcaacgtttaatttccggtctatcagttgtcccgactcttccgtataactcggcaaccactccaattgcgactcgtcgttcacacagaacgagtagatgatgcaatcgttttgagaaccttgaaaccgctccaccgtatcgacacgaatagtatcgaatgcagaaataccgaatttatcgagttcttggcggattcgagctatttgatgtctgtatggagcaatgattcccaccgaccgttcgtcgaactccaacccgttacgttcgtacaatctatacaaagcatttacaatggcagcggttttgcaagcctcctcattattatattttttcccggcacaaagagtcttcgtcgggaaaaaagccgtcctcttcgtcgcgattactctttcccacttatcatcgcccatattcgtaaaaggcagtaaagatatttgatggggggcatttccatcgcgcaacgcccctttataaaaataagtattggcaaacgatgcaatatcgggatgcattcgccattggcaatcgagcatatcggcaaaaggagaaccttcgggcaatcgccggtacagccgctcgaataaagaaatacgacaatcgacaaacccggccgaacgcaaccgttcatcggtgataacagactcttccgcagactgcacgacaacggcgggcaactgtttatggtctcctatcaaaataaatttacctatggcatcccgtcccgtaggggtcttggcagataacagccctacgagttgaggttccaatatctgtgaagcctcatcgacaatagccacatcgaatcgtttcagattaaaaagctccatcttccccgacaaagaagacaaggtagccacaaacacgcggcaagagtgtatcgaacggctcgcctcctcccgattccggcattgcttcatgcgctcggacaacaagtgagaacggtatgcgacatcacatgaaagagtctgtcctacccgaatataatcatcgacctcacctatcgtttccaacttatcgcagatttcatctaccgcacggttggtaaaagccaccaataaaatctggtaatccggaatagccaaaaactccctcaccatattccgcaacgccaccgaagtttttcctgttcccggaggcccgaccaacagaaaataatcctcggcttgcagagcttttaataaaatacgggataaatcgggactgtcatattcataggacaatcgacgagacatatttcggactggcgactctcccgcctcgccgaccaacaaacctctgcgatgcggagaggcatccaacatcgcatacaaacctttgtactgtaacaaaaacgaagaatctacatagtcgtgttctaccgcataacaagaagctatcggcaatgcctcggcatacgattggttatcccgtaatctcaacacgacacggtcggccgtcatagaagcgatcgtcgccttgaaaacttgtcgggtagatactctatcggcatcggtatcgcacacatagaacaaaacaatatcacccagtctgaaatcgggagacggcgtatttcccggcaaaataaattcgacttcgggaatatcttccgccgcacaatttcgaaccaaccgcagtcctgaaaacatatagccttccctctctttttcgtcccgagtcattcgccacaaagaagcaacgccggatattccgctacccgaaggatagccgattttcgacaaataatgttctcgcgaaacaaacgcataaaaccgatagaaatatcgcagagccaaatcgttatcgtctcgtcgctccaatctcctgcggccacagtctatctcgggacgaatataccgctcggtaaacagactgggtcggggaatgaggttatcggcagtcagccgacttaccaaccattcagcctgtacatatccatatcgagatatatcccgttcgacagacacaattttattcctcaaattcaaaagtttctgcaattccctcgtcgatgttttcaccggacgcaagcaaccttccgggttcaaatttcgagaatataacaaatagaaatgctggttttccaattttacactaagtacactttgtatcatcgactgatacaaagcacactgagcccgatgtgggaacgacactttcgacaaatcgttttcgggataaggcgggcggccggctttcaactcaataccacagaggccgttttccacttgtaaaaaatcgagacggccctgcaatcccaaagcctcacagataaaagaaggttcgaccatcgcttttcggcggtctattcccaaagcagaaaaatccgtactcagaatacgtttcaatgtctcgaattgactgtggagattctgaaaaaatcttctatctaccgactttgccgagacaaattctatcgggtaacgagcaaaaattttcggcattaaggaatcgaaagttacactccgaaaatctttcgacgttatcagttcatcaaaaatcaaattaacggcattacccaacaaaatagaatccgttatcgtcttgggacgtatacgattccaaaaataacgttgccaacacgttccatattcctgcacacactcggctaacgcactggcatcaaccaaataatcgggttccaatataagaaaacgagggagcaatccgccatcgactataataacgtctaccaaattcaatttagaaccgggttccaacaagcacaaggtttcgtcgaattcactattcaccctgtcccgatgaatccacaccggcatttccccgaataaagagggagccgcaacacgaacccgcaattcattttctcccgcacagattacctctgcggtaatacgacgaaacgaatcgtgtgtatcctcctttacttccgagctgtgcatctcctcctttattcttctatataatattaccgatttttatttcagtacaaaaatacccattcgaccccaccagcccaaataaatacgatctattttatcgtgaattcttttgcgataaaataggcttagtctataattagcggggattgtccttgtatattccatcgctatgcgacacagggggaaggaataaattctgatttgacaaaaaaagcgcaatcttttcagattgcgcaccaaagaatctattgtaaatctaaatacaaagagtcttgtgaaatttaagctctcggacgagcttctttaatgaccaatgcacgaccggcaaattctttaccagacaattcttcgatcgcccgtttggcagcttcgtcatcagacatctcggcaaagccgaaaccttttgagcgaccagattcacgatccacgataatttttaccgaatcgattgcaccaaaaccttccaataaggtttgaaggtcttgttctttaaccccataattgaggtttccaagataaatgttcataagaaaaaaataaatgaataaaattaaaacttccgcatcggatactcttatgaacttaaaataaataatctcccgttttttcacagaagagaatctctgtgtaagcacatatagcttcgatacgggagcaaattaaagtataattttcggatatatcatctattttcccaattatttttacagaaatctcatttcttgggaaaatatatcaatctttcacttattaccgaacaaggctcgcattctgtttcttataaaaattttatggaatatagtgtagactttgcaagacagccctgatcttctcataagtcgtaatacgggtagggacaagtggcaatcgtaatttattctcgatatatcccatagcattcaacaagcatttaactccggccggatttccatcgacaaacaataggctgaataattctgtgaagcgatgatgaatagacaaagcattgtgaaaatctccgttcaacgctaatctcaccatcttgctgaactctttcgggaaagcattcccgataacagaaatcactcctacggcccccaaagtcaacaacgggaaagtaataccatcgtctcccgaaatgaccataaaatcggcaggcttatttttaataatatcgtccatctgagtaatatttccagacgcttccttgatggcgattatattaggatattctttggcaaggcgcaatgtcgtttcggcattcatgttcacgccggtacgccccggaacattatataaaataaccggcaatttagacgcctgagcgattgcactataatgctgatatattccctcttgggagggcttattataataaggaaccaccgataaaatggcatcatagcccgaaaaatcgtcttttttcaaatggtctataatacccctcgtattatttccacctaacccgaggacgagaggaatacggcccttcgtacgttctactacaaatctttttatctccgttttttcttcttcggtcaatgtaggagtttcggcagtagttcccaacacgacaagataatcggttccattttgtatcaaatattcaataagtcgcgaaagggcttcgaagtcgatactttcgtcttctttgaaaggcgtgataagtgccactcccattccgcttaaattgattctcgccatagttttatatcctcttaaatatcgattccaaaattacagattattctcttttacaccaattttcttccaataaaaaagagcactctgtaacaactcgccggcattcggtttcgacctacctactccggtatcaccatcttcggctactcctccccggggagacgactccggcaaaagaatttgcaaattgaacggattgctttctcctttgggtactcctattttaaaaatagaccgggaacgtacggccaaatataataaaggtaaggatttagaaatcgacacatcgatcaacacatctccatcgttattgtcaaaatttctcaggaaagcccgagtcggtctttttaacaaccaacaagtctgcaaaacaagtatcggactgcatccgggaacctctaccgataccttgtctttgcgatgtgtatctataaccaacgtgacatcaatacccgcccgaaccatctcctgaataccgggaagaagagattgaacatctttgccctgagccatcaataccaaacgcttagcccctccgaaaggacaaaacccatcgctctgtcttctttttagctgacgcttgatcgcccatttagtaataaacgaaaataacatggattatctatttattgaatcatctccaaaaactcttcttcggataaaatccgaactcctaattttctcgccttttcaagtttagccgggcccatattctcgcctgccagaatatatgtcgttttacccgatacggaacccgtatttatacctccgtgctgttcgataagagctttatattcatcacgggaatgatgggtaaacgtgccactgataacgattgtcgcaccggataacttgtcggttctctccgaaagtcgctcttcggtaatttgcatctgcactccatattgtctcaaccgttctacgaaacggagattatcctcatcagagaaataagctacgacactttgagcgatacgcacccctatgtctcctatccgaatcaagtcctcggtagtcgcctcgataatacggtctatcgaatgaagtgccaacgccaacttcttggcgaccgtttcgcccacgtaacgaatgcccaatgcgaataataccctctcgaacggaacggaacaagactgtttcaccgcatcgacgatattttgtgccgatcgttctcccatacgttccaaaccggctatcacatcgggctgtaaagtatacaagtccgaagcgtctctcaccaagcccaaactataaaactgacctatcgtttcactcccgagaccttcgatattcattgccttgcgactgataaagtgctctattcgccctttaatctgcggaggacaacctttttcgttcgggcaaaaccatgctgcctctccctcgatacgtttcagcggagttccacattcgggacatgcacgaatgaaacgtactttttctcctatcagtaaacgagcagaggtatctaccgctgtaattttaggaataatttcgcctcctttctccacaaaaaccatatctccgatgtgcaaatcgagagcgtttataatatcttcattgtgcaaagtcgccctcttgacaatagtacccgataacaataccggatcgagattggcgacaggagtgacggttccggtacgtcccacttggtaagacacagaattcaatcgcgtaagggctttttctgcttggaacttataggctatcgcccaacgcggagattttgccgtatatcccaaattcttctgttgccgcaatgaatttactttaaataccattccatcggtagcgacgggaagattcttccgctccatgtcccaataattgatatactctttcacctcttctacggagtgaagtttgcgaacggcatccgaaactttaaatccccacgaccgagcatattgtaaattttcataatgcgtatcggccggtaaattttcgcccaacagataatacagataagcatcgagtccccgcgccgctaccacagccgagttttgtgatttcaacgttcccgccgccgcattgcgaggattggcaaacaaaggctcctcctgttcctctcgctctttgttcaaagcatcgaaaacagcccaaggcatcaatatctcaccccttatctcgaacgaatcgggatagtcgttgcctcgcaactgcaaagggatactgcggattgttttcacattctcggtaacgtcatcgcctcgcgtaccgtctccacgagtaaccgcccgcaccaatctacctccttcataaatcaacgatatggaagttccgtcatatttcagttcacccaccaattcaaaatcctctcccatcaatcccgaacgaacccgttcgtaaaatgccgatacttcttctatcgaataggtattgctcaacgacaacatcgggtaacgatgttccacttgggaaaaagatcgatttatatcgttcccgacacgctgcgtcggtgaattgggatcgaaatactgtggaaaagtctcttccaacccttgcaattcatgcatcatttcatcgaatgtacgatcatcgatcgtgggagcgttcaacacataataattataattatgctcatcgagttcccgacgtaaacgctctatcttttcttggggagattccatagggacattaggttttgtttttgggcaaatatagtgaaagttgagtgcagagacaagaggaaatcatatttccaacttggctatgccgaaacgaatcctactacaaatatagtgaaaggcaagcgcagaggcaagtattcgaaaatacttccgctcggtaagacgaaattaaaacaatctttattttgctcggctctcgcttatttgtatctttgcattagaatgcaaaagagggaaaatgttacagtcgaaatcattgtgtggagttactttacagtataacatcgaaggagacggttatccggttatcctcatgcacggctgggggtgcaaccacacgaccgtgcagtcgatagaacgactgctatcacctcatttcaaggtatacaatctcgactttcccggattcggcggaagtagcactccgccctcgatatggggcgtggaagaatatacgcaaatgctcgaagcgttcataaaagacgaaaatatagaagccccaattcttatcgggcactctttcgggggacgggtatctatcttatacgcctcacgaaacaaaacccataaagttattttggttgatgctgccgggattaaacccaaacgcccattaaaatactacctgaaagtctactcgttcaaactgtggaaaaaagtcttaccacttgtaatcgggaaaaaacaagccgaaaaaacaatcgagaattatcgccgcaaatcgggttcggcagactataacgcgttgacaggtatcatgcgtaatataatagtaaaagttgtcaacgaagaccttaaagcggttttgccgaaaatccagtgtcccgttcttcttctatggggaaaaaacgacaccgccaccccattgcgagatgcccgcatcatggagaaactgattcccgatgccgggctggtagcattcgacgatgccgggcattacagcttcctcgacaagccttacgaatttaacaccgtcttacaaaactttttacaagacgacataaaaagaaaatcatgaacgaaatactcactctcgtaacattccttgcactgctcttttatacaggaatagagatgaaattccagttgcaaatgttgcaacaaaattcctaccgaaacgaccgatacaaccgttggttaaaaggagagtctttcgccaccatatcccgtttgaccgatttgtttctattgctgctgttgtcaaccaacttcctgccgacattcgtacaaatcgtcacgattacagtggtcttggcaaaaagcgtaaaagggttacaaaccaaatataaaaaacctttggttttcaccaaacgagctacccgcttatacatcgccgcattgtcgctctcgcttcttgtcgcaggtctcgcagccggcttaacgactctttccaacggtagcagagccttattggcgatagctatcttagccccctatttcatgatggctgccaacatcatcatgcaacctgtcgagaagcgaatcaaccgaaaatattacgacgaagcgaaacaaattctctcccaaatgcaagacttaactgtcataggcattaccgggagctatggaaaaaccagtaccaagcactacctttaccgcatactttgcgagcgatacaacgtgttaatgactcccggcagttttaatacgcctatgggggtaatccgcaccatacgggaacaaatgaagccctaccacaacattttcatctgtgaaatgggggctaaacagatcggtgatatcaaagaaatatgcgatctcgtcgcacctcaaataggcattatcaccgccgtgggtgaacagcatctcgaatcgttcaaaacgatcgggaatgtacaacgtaccaaattcgagctggtcgacgctttgcccagttcgggattggccgttatcaacaacgacttcccctatatagccaatcggccggtcgaaaacgtccccgtgaaacgctatacgatagccgataccggtgcagactaccatatcgaggatattcgctacgatacagatgccacccgctttactgtggtaggcggtggagaacgcatagaactgagcacgaaactcatcggcgagtgcaacctctccaacctcatggcggcagttatcacggctcgccatctgcaagtgcctgttccctcgatacaatatggagtgagccgaatcgaacaggtggaacatcgcttgaacatgaagcggacaccgggcggaatctccattatcgacgatgccttcaactccaatcccgatggcgctcgcatggctctcgacgtactccggcgcatgacacaggggaaacgcatcatcatcacaccgggtatgatcgagttgggtgaaaaacaagttgagtataactaccttttgggcaagcagatagccgaagtatgcgattacgtcatggtagtgggcagatacaatcgagaggctattctgaaaggattgcaagaaaagaattatccggaagacaaagttttcgttgccgacacttttgccgacgcacaagcccggctcgcacaaatcgcacaaccgggcgacaccgtcctttatgaaaacgacctgcccgatacgttcaaataaatttcgattattatcacaaaccagatatacagtttatcacaaaaaattatgaaaactaccgtaggtgtttttttcggaggtcgctccaccgagcacgaaatctccgttatctcggctctccaagccatcaatgcttttaataaagagaaatacgaaatcatacccatatacatcaccaaacaaggacgttggttcagcggcgatgccctgctcgaagtaaaaaactatcgcgacatggctgccctgcaaaacatgtgcgccgaggtttacatgattcccgaatacggcgactacaacctctaccgcaagaaaagagcccttttcgggaacaatatatgggcaaaactcgacgtagtcattcccgtactgcacggcagtaacggcgaggacggcatattcgagggcatactcgaatccatcggtataccctatgccggttgcaacacactctcctcggccaacggcatggacaaaataaccatgaagatgattatggaaaagagcggtatccccatcgtcgattacgtatggttcaccgacaaacaatggttcgcccaacgcgataagctcatcgaggaaatcgagacccgattgggatatcccgtcatcgtgaaaccggccaatttaggatcgagcgtaggtatatcgcatgccgataatcgtgaagaactcatcgccaaagtagatgtcgccgaaaaatactctacccgtatcgttatcgaagatatggtcgaagaactgaaagaaatcaactgctcggtattgggcgactgcgacgattaccgtacctcggtatgcgaggagcctatcaaaagcggcgatattctcacttacgaagacaaatacatgggtggaggcaaatccaacaaaggcatgcaagccacacaaaaacgtattcccgccgacctctctcccgaagataccgcacgggtacaattccttgccggcgaaacgtttcgggtgttgtcttgccacggggtcgcccgtgtcgatttcatgatcgacggtaaaagcggcgacatctatgtcaacgaaatcaacaccattcccggttccctctcgttctacctatgggaagcctccggcatacgcttcgaccagcttatggacaaattagtagacctcgccttgaaacgcaaacgcgagtcttccatgaagaccgtcagctacgaccaaaacattttcaacctcggcaaagggctgaaaggtgggaaaatgggcgcaaaacaaccataaagagacagccacaaagctaactgatatacaagtaattgattattctctcttgccacgtcccgtagtattacgaggttctgtgtaagcggtatagagaaaaacagcgaagaaatagaaaagctgaaaaagataatatgtttacttgaagagtttacctcctcgccctatgggcacttcctccctatatttcttcggaaacaccccgtaaggctacgggacacggcaggggaaatgggctaaatacgcttcgaacattttttaactcctcccctgtgtggcattagccataggggaggtggcacgtagtgacggaggtattgaaaacgacatctcacctaccggtttatatcggacatatcctttctctcctgccgtgtcccgtagcattcggggagctgtgttagcgatatagagggggtaaataatccatttacaacctcggaaagagacaaaagccactatccccataaaacaaaagcggcgaacctcccgacccgccacttcttctataaaaaacaaattgatcattccataagtttgcgataacgcacccggtgtggttccacatcgcccatacgctttttcttattttcctcgtattccgaataagaaccttcgaaatagaacactttcgaatcgccttcgaaagcaagtatatgggtacagatacggtcgagaaaccagcggtcgtgcgagatgactacggcacaaccggcaaaattttcaagaccttcttccaatgcccgcaaagtgtttacatcgatgtcgttggtaggttcgtcgagcaagagtacattaccctcctctttcaaagccatagccaaatgcagacgattacgttctccaccggaaagcaccccgatgagtttctcctgatcggctcccgtaaaattgaaacgggagaggtaggcacgagcgttcatatcccgaccacccatgcggaacgtttcgagtccgcccgaaacgacttgatagaccgtcttggcagggtctatatctttgtgggtctggtccacataagcgatcttcacggtctcgcctacttcgaaagttcctttgtcgcaagcctcctgtcccataatcagtttgaacagcgtagtttttccggctccattcggtcctatcacacccacgatgccattgggaggcaatacgaaatcgagattatcgaaaagcaatttgtccccgaaagccttagcgactccgtgagcctcaatgactttgttacctagacgaggcccgttggggataaagatttcgagtttttcctctcgttccttttggtcttcattcaatagcttatcgtacgagttcaagcgagctttacctttcgactgtcgggctttgggagccatacgaacccattccaattcccgttcgagagtcttacgccgcttgctcgcctgtttctcctccatctccatacgtttggtcttctgttccagccacgaggtataatttccctgccagggaataccttctccccgatcgagttcgagaatccacccagccacgtggtcgaggaaataacggtcgtgggtaatggcaataaccgtaccgggatattgctgcaaatgctgttccaaccaatcgatcgactcggcatcgaggtggttggtaggttcgtcgagtaacaaaatatcaggctgttgcaacagcagacggcacaatgccacccgacgacgttctcctcccgaaaggaattttacgagttgatcctcaggcggacagcgaagcgcatccattgcccgttccaatttgttgtctatgttccacgcatcggaggcatcgatgtggtcttgcaattcggcttgacgagcgatcaaagcctccatcttgtccgggtcttcgagtacgtcggggtcaccgaacgattcgtttaccttttcatattctgccagtaaatcgagaataggctgcaccccttcttgcacgacctcttttactgttttctcagggtcgagtttgggctcctgttcgagataccccaccgaataccccggcgagaataccacttcgccctgatacgatttctccactccggcaataattttcaacaacgtagacttacccgaaccgttgagaccgataataccaattttcgccccgtaaaaaaacgagagataaatatctttgagcacttgtttatgcggagggaacatcttgctcacccccaccatcgagaatatgatttttttatcgtctgccatataaaaaagatagaattaaaaagtaaaacttattttttcaagggagtcgctttcacgcgatagtcgcagcgtaccttccctttaatgatattggtcaacttcgattttatcaattgcttgcgaatgggagaaattcgatcgataaagaccttcccttccaaatggtcgtattcgtgttgaaccactcgtgcaagatacccctcgataacctcgtcgtgaggttgaaaattctcatcgagccacttcaaccgaattttctcgatacggggaaccggttcgtgaataccgggcagactgagacagccctcctcccgggtctccttcgaaccgtcctccaatacttcgagaaccggatttatcaaggtcagcttcacatcggcgcattcgggaaaatactcggccataggatttacgtcgataacgatcaaccggatagaaagtcctatctgcggagctgccaacccgataccttcggtagcatacatcgtctcatacatattttcaatcagctctttcagctgagggtaagaagcatcgatctcttcggtctccttacgaattacgggatgcccgtaaagataaacaggtagtaccatatcttattgttttttactttccaaataatccctcagaattatcgtcgcgcttatctcatcgaccagctccttatttcgccgagccattttggacaagccaccgtcgatcatcgcccgatgagccaaaaccgaagtgaaccgctcgtcaaaaaactctatcggcacattgggaaaaagttttttgaaccggttgacaaaaggggttatatagcgcatactctcggacggctggttattcatctgccgtggcagccccacgacgacccgttcgaccgattctcgctgcatatactgcgtgagaaaatcgatcaactgcgacgatgccacggttgtcaatccgtttgctataatttgcaacggatcagtcaccgctatgcccgtacgctttcttccgtaatctattgaaagaatccttgccatattagagtacaaagatacgtataagcgagagtagagcaaaacaaagctcgctttaattttatgctgccgagagcggaagtatcttcgagtttcaactcaaagatagtgaaaggtaagtgcaaaggcaagcggaaatctcgcttccgatttggctatgcactcacttatgcgtatatttgaaccatattttattccacaccaccaataacaaaaaaaataaggattcgttacggcttcttacgagtgaatgtgcattgaaccgatcatattaacataacacatgataagatgaacaaattttctgtcattttcaaattatccttcatcaacactatctttttttatctacccgttctcgcaaacaattctcccgtagattacgtaaacactctcgtagggacccaatcgaaattcgaactatccaccggaaatacctatccagctattgcaatgccgtggggtatgaacttctggactccgcaaaccggagatatgggcgacggttggacatatacatacaatgccgacaaaataaaagggttcaaacagacccaccaacccagtccctggatgaacgattacgggcaattcgcccttatgccggtaaccggaggagtcgtgttcgaacagaaccaacgtgccagttggttttcccataaagccgagatagctaaaccttactattataaagtatatttggccgaccatgatgtcaccacagaaatgacggtaacggaacgagcctctttattccgtttcacatttcccgaggagcaaaattcgtatgttatcgtcgacgctttcgacaagggctcttatataaaaatcatacccgaagagaataaaatcatcggatattccacccggaattcggggggtgttcccgaaaatttcaagaactattttatcattgttttcgacaaaccgtttcaattcactgccgtggccctcgataatgccatcaagaccaatcaaaccgaaatcgaagggaaccatgcaggcggtattatcggtttctccacacacaaaggagaacaaatacacgcacgagtagcctcgtctttcatcagtttcgagcaggcggaattgaatttgcaggaactcggcgatggagatttcaaccgtttaacagaagaaggaaagaaccgttggaacgaaatattatccaaaattgaaattaaagacaacgacatcgacaatttgcgtacgttttattcctgtttataccggtcggttctttttccacgagcattttacgaaataaatgccgagggtgaaaccattcattacagcccttacaatggacaagtattacccggttacctatttaccgacaccggattctgggataccttccgctctctattcccgctgttaaatctaatatatccctcgatgaacgaaaaaatgcaagagggattagtcaacgcttacaaagaaagtggatttttacccgaatgggccagcccgggacatcgggattgtatggttggaaacaactcggcctcggttgtcgccgatgcctatatcaaaggcttgcaagactatgacatagaactgttatgggaggctttgaaacacggagcgaacaaccacctgaaaggcacggcatcgggaagagtcgctttcgaagcgtacaaccggttgggatatgtacccaataatatcggtgtgggacaaaatgtcgctcgcacattggaatatgcctataatgactggtgcatttataccctcggtaagaaattgggaaaacccgatagcgaaatagagatttataaacagcgaagcctaaactataaaaatgtgtacaacccgtcggaaaaactcatggtcgggaaagacgatcggggaaaattcaatcctcgtttcagcgccacggattggagcggcgatttttgcgaagggaacagttggcattggagtttctgcgtgttccacgacccgcaaggactcatagacttgatggggggcaacgaagcattcaaccacatgatggactcggttttcgtcatacccagctacttaggaatcaaaagccggggagtcatacatgaaatgagggaaatgcaagtgatgaacatgggacaatatgcccacggcaatcagcccatacaacacatggtatatctgtataactactcgggagagccgtggaaagcgcaatatcgggtgagggatatcatggaaaaactctattccgccactcccgacggatattgtggtgacgaagacaacggacaaacctcggcttggtacatattctcggctctcggattctatcctgtctgtcccggaaccgaccaatatattatcgggacaccattattcaaggaggcaaagctgcatctggaaaacgggaagtgcctgaccatcgaggccaaaaacaatagcgcaacaaacaaatatattcgttcgataaaactcaacggaaagaaccacacactcaattatttcaagcacaacgtcttggtagaaggcgggaaaatacaattcctcatggacaacgaacccaatttgaaacgaggctcaaccaaagaaactgtgccttattctttctctttggcgaatgaataaaatgtagtacttttggaaagacaaatcaatatcatatatgaactgtaagaatagcataggtatcctatccgtaataatcatactgttatgtggttgtcaacccgataaaaaaaccacatttaccgcagcctcctataacctgaggaacgcaaacagcgccgattcgttgcaaggagacggttggggaaatagatgccccatcatagccgggctggtacagtttcatgaattcgatatttttgggacacaagaagggctcagacatcaattagactccctgaaaacgagcctcccgaaatatgattacataggcgtggggcgtaatgatggaaaaaaggaaggcgaacatgcagccattttttaccgaatcgataaattcgaattattggaacacggagacttttggctatcggagacacctgaaaaaccgagcgtcggctgggatgcggttttaccgagaatctgcacttggggacatttcaaatacaaagaaaccggatttgaatttctctttttcaatctccacatggaccatatagggaaacaagcccgagtagaaagcgctttgctcgtacaacaaaaaatgaaagaaataggcgaaaatctaccagctttactcaccggagatttcaatgtagaccagactcatcgctcctacctcgccttaacaaaaagtggaatactccgcgacgcattcgaagtagccgacttgcgttatgcgatcaacggcacattcaacggtttcgactctgacaactacaccgaaagccgaatcgaccatgtgtttgtaacgcctacattccatattctgaaatacggcgttctcaccgacagctatcgtcgtatgaaagaaggcgctcaaaaagcctcggtaaaagattgtcccgaagaaatctcaatcagaagatacgaatctcgcataccgtccgaccatttccctgtaatggtcaagttggcagtatgcgataaaaactaaaacgatatacgtcgatttcccaattataactgatacacatttttatttattaaccatacatacagtatatttttatgaaatctattgcaaaagtaagttgcttatgtctggctctcggatatggattctcctatacccatgcagccacagctcgtgtagcgacagcacagcaagacaacacccggatacaatacacaagcaaccgtccgcaagaacgcttgttcgtatccaacgccgtagaagaacaaatcaaacgagtaaaatccttattgacaaatgcccggctggcttggatgtttgagaactgttttccgaacacactcgatacgaccgtacatttcgatggggacgacgatactttcgtatataccggtgatatacacgccatgtggttgcgcgactcaggagctcaagtatggccctacgtgcaattggctaaccaagaccctcgattaaagaaaatgttggcaggggtcatcaaccgccaattcaaatgtatcaatatcgatccatacgcaaacgcatttaacatgggtcctaccggaggggaatggatgtccgacatgacagatatgaaacccgaactgcacgagcgcaaatgggaaatagactcgctgtgttatcccattaggttagcctatcaatattggaaagttaccggtgataccagtgtatttggcgaagaatggatacaagccattacgaatgtactgcgaactttcaaagaacagcaacggaaagaaggcaatggcccctacaaattccaacgtaaaacagagagagctctcgatacaatgaccaacaacggattagggaatccggtaaaacccgtcggactaataatctctgcgttccgtccctccgacgatgccacgacattccaatttctcgttccttcaaatttctttgccgtaacttcattgagaaaatctgctgaaatcctgcggaaggtaaatcacaacgagaaactagcgaaagaatgttccgatctggcccaagaggtagaaaccgccctgcaaaagtatgcggtttataatcacccgaaatacggtaaaatatatgccttcgaagtcgatggattcgggaatcaactgctgatggacgatgccaatgttcccagcctgctggcaatgccctatttgggagatgtggacataaacgatcctatttatcaaaacacccgcaaattcgtatggagcgaagacaacccctatttcttcaaaggtagcgccggcgaaggcataggaggcccccacatcggttatgatatggtatggcctatgagtattatgatgaaggcatttaccagtcaaaatgatcaagaaataaaagagtgcatagaaatgttgatgaaaacggatgccggaacaggatttatgcacgaatcgttccataaaaacgatcctaaaaatttcactcgggcttggttcgcttggcaaaacacacttttcggcgaattaattctgaaactggtaaatgaagggaaagtagacttattgaatagcatcgacattcaataaaaataaaacgcaaaagaaataaaaatgcccctgtaatacaggggcatttttatttcttttctttaaaacagcagctcaaatattaaaatagcataaaataagaatgattttttcagaaaacatgttgtaaaacatataaaagcagtatatttgcactgtgtttttcatggtattagatttaaggttaagaagattggttgtcgggagacaatcaattttttttatttttactctcatagtaaaatcatcgatataatcaaaagatgccccgacgaccgtaacaagaaatcatttccatcttatttatcgaagagtaatatataccggagcccctgtcaggcacggctctataactccattcgacacctctacaatatcggtccgaccatataaatcggttgtgaccaatcggggagaaacatctcccaccgctatctttattgaatgaggcactatcttatcaggactttccattactcccggagccgtccaagcgaccaacttttcattgccgttcttgtcgataaaacggagtacgaaatccctcttgttctctgtcttcattcggcaatccaacttgtatccgcttaactctttcacaaaggttttacaagcattataggcgggagtcatatttcctgcacggtataaagcaaatccctcttttccaccccattcataccaaatggttacaggcaacccctctaataaatcaacaaggtattgccgaatcacgtgccacgcttgatattcatacgcaagagaaggatcgccccctgcatatccctcggcctttcccaaagggaaaccccgctccgaatttatccaaagacgtccggtatctccaccggctttcttcattaaattgcgagtatgagaatatgcctccatgtaatcctccggagctttcacgccataaggatgcaccgaccatatatcccaatggatatccaacataccatctgcaaaacaataggacatccatttataagactcagaccacatgttcgaaaccgaacccgccaaaatcacacaatcgggattggcctttttcatggccggcacggcagcccgtaccaaatctgtatattcccgggcatactgaggggagttgccgactttcccatgacgtccccaaaatgtcatcgtattcggttcgttccatatctcccatataatatttcgccctttatagtgttttaccaactcagctgcaaaatcggcataagccgaacgagccggttcgtctttcacatgcccgtacagtttattactaaaagccatacagccaataattttcaaacctctcttctcacaatcgtttacaaaacgatcatactgactaaaatcataaacacctttttctcgttcgatagattcccaaataaaccctcgtcttacccacttcatacctaattcctgtacacgatctaaatcttccgggccatcggtatcgccttttaactgaactcccatattataaggaattgttccatcgggaataatcttcgacaaagcaaaagaagggaaaaccgaaaacgataacaagcctaaaaaagctaaattcttcaagagtttcacattcataactaaaccaattttcatgatattactatatacataaagacgataaaagaaaaaatctttacccacctcaaaccaaaatatttagagacggtctctattttttattcatagatagcctaccgccatcataccgggaaagatacagagtttttaaatttatccccgacaaaacaaaaaagcctgtaagaattcttacaggctttgtgcggacgacgggactcgaacccacacgtcgcaagacactagatcctaagtctagcgcggctaccaattacgccacgtccgcaaacgacggtgcaaatatacgagaagtttacaaactatacaattattaagacacaaagtttatcgggtgaaaaacaaatctttcatcaagagcctgttatgtaagagattgcccgatcgagtatggtatcgtgacctttcgatgcctgttcggaatccatatccatcttaaaaccctcggtcggctcaacaccgaactctgtatgttgccgttctatatcatatatcggggaagccgaaaaccgaatgctccaaccgttaggaagttccgacgaaaaaggcaatccactaccgccccccgtacaatcgcctatgacaataacatttggcagagctttcatcaccgatacaaaattattccccgcactaaatgtacctcgattggccaatacaacgaccggcttttgataacgaatccggctcgacggagaatattctattggataaagctcagagaagtcctgatgcccgaatcccgttttatgggaaatataaccgacgaccgtctttcggttaataaaccgagacaccaaagtctcgacattcgacaaagacccgccgccattgctgcgcacatcgataatcaatcccgtagaagtcgataaataggccaatatctggtcgaggttaccatcgcctatggtactagaaaaactgccgtagtacatatatcctacattttgaggcaatatcttatattttataccactggtataccgatagtcgaaattaagataatactcatctattatacgttcgtcgtaattcgtgggagaaccatacaaccaatcccaataccgcgaggtatcatgtgcggcgataagattcacatggccgtctttcaactccatgagcatatcgttacagacactgaacaactcctccgatgtcattctcgatgtcagcttcttccgatatttggttcgtatttgcgtccaatctatattcttatactcaaaaaaacagtatcgttcatcgagaatagtccacaaagcatcgaaattaccataaggatcatcttcgaacacttccactttatggcaagacggaaacatgaaaaccgataaaatcgaaaccaacagtcctatttttgaaaacctatgcatcatatcctatctcccattaataataaaccgaaactatccgacgatccgaaggagccgcacgaaatatctcgccggaaattcccaacacaaatgtatgagtcaatacttgcgtatctatactattgatatgcgtcgtacgcattacttgacgataccccagacgtaatgcccgctttcccacatgaagatcgaccgaaatataattccgcacatcgacccggttatgccatgctccgaaatggacgatcccgctacaattccctataccgaacatctcataataggactgtccgaattcaggagagaaaaaagtaccgattaccggtaatgaaacctgatagcgaagagttaccggcaatcgtgatatataaaaatgatacgaagccatagcggtagcacccaagtcgatggcagctttcgccgttgccggattattggaattacgcaaattatacaatccccccaacgtaagtgaagcctctccacccccagacacatacagtctatcgagcaactgccatctccttaacatcgcaaacgaatagtccaaataaaacgataacatagagccgctccccgattgattagtcatcgaggcgaatgaaccggaaacattgtggcgggtaaaccacttttccggggcaaaactaaccgcccgaaggcgttcgtaccccaaagccacatctaatccccaataacggataggtgtcaaataggtatccaaagcactttgccttccgagttcgaccgtaaatacagacgtgaccgggcgtaacggcttctccgaatctttttcctgtgccgatacgcataaaggagaaaatatcgaaaaagtaatacccattaaaatggcacgtaaaatcgccttacatttcgtcataattaaaacaaagtcatttgtcccgaagcactatcttccggtttatcgacattactatccataagagtatccgtttcgacactactgtcatcttcaacgacagaatcgtcttcttgcctcaacggttccaattcgttaatggtcgcgacagaataattcgtaagccgtttccccttcgctttaaagcctttcactgcgataaattcggctgcatccacaaccataggttctcggaaagagtccccctctccgaatgcgacttcaatacggggataagccgtatcggtaatcaacaacaaacgggaatctggattatctcccaagaaactttgtttacggctacccgcttcaaaaacaaatcgtttcaaatagggataaccttgcgccgcatcatacaaagctactgtccaaactttatcgggatcaaatttctctatccgtaaaatattggggtcataatgattcgtggcatccgatgtcgtcgtgcaaaactcgccattctccaaaacgacaagcacttgatcgtctccatgaaattcgcccaaatattctcctcgtccatcataattcaagcggagaacatctcgatcaaaccaaaccttgcgtccacccaatgtagatccgccccgttccttcaaagaaatacgatgaatctcatttttagtaagaatatttcccatagattgacggcccttaatggctatttcactgaaatcgcggtcgacaaacagagttttcatgcgaggcttcgggacaaaagtcacccgcaaaacctcggcttctccattgggattcgctgtaaaccaaacgaccctcgaccccggtttgccctgcgtaagatcatattccttatcccgagtcacaccggtcacagcaaaacgtttcatataatgcaatcccgcctttccgtcccgataaaccgcattgtatatcgtacgtttatcattcttcttaaatacggcaatatgtaaaagatttttccctacgaacattttctcactcaccttcactaccttatattttccatctcgatagaaaagaataatatcgtctatatcggagcagttacaaacgaactcgtctttcttcaacgatgtaccgatgaacccctcttctttattgatatagagtttttcattcgcctcgaccactttggtagcctcgatggtatcgaaactacgaacttctgtcaatcggggataacgactgccgtatttttctttcaaagagtcgtaccacttgattgtataatcgaccaaatggtctatatcataatcgatttgagcgatttgctcttttttagcagcgatcaactcatcggccttctctgaattaaatttaaggatacgagccatctttatttccatcaacttcaatatatcgtcggaagtcacctcccggataaaagaaggcttgaacggttccaaacgcttgtctacatgcgcgatagcctcgtccatagaacggctttcctcaaattccttatccttataaatgcgtttctctataaatattttttctaatgatgcaaaatgcaaaatctcttgcgcttcacccttctgtataagtagttccttatgcagcaattctttcgtgttttcgacactgatacgcaacaaatcgctcacggtcatgaagtgaggtttatcctcattgatgacacaacagttgggtgaaatgctcacttcacaatcggtaaaggcatacaaagcatcaatagccttatcagaagaagtgcccggtatgagatgaaccaatatctcggcatgctgggctgtattatcatcgacctttcgtatttttatctttcccttgtcctgggctttaagaatagattctatcagtgtcgatgttgtcttgctataaggaatttctacgatagaaagcgtacgattatcgatcttctcgattttagcacgtactttcacgctgccgcctcgttccccatcgttatatttagagacatctataaatccacctgtctgaaaatcggggtacaaatgaaactcctcgccccgcagataatccacagccgcttgtaatatctcattaaaattatgaggtaatatcttcgaagccaaccccacagcgataccctcgacgccctgtgccaacaacaaagggaatttgacaggaagagtcaccggctcttttttacgaccgtcataagacaacttccattcggtagtcttcggattaaatacgacatctaaggcaaacttggataagcgagcttctatataacgaggagcagcggcagaatcgcccgtaagtatatttccccaatttccctgacattctatcaacaaatccttttggcctaactgcaccaatgcatcacctatggaagcatcgccatgagggtggaactgcatagtatgtcccacaacattggcgaccttgttgaaacgcccgtcatcgagcaatttcatcgcatggagaatacgcctttgtaccggtttcagaccatcggccaaatgaggaaccgcccgttcaagtatcacgtaagaagcataatcgagaaaccagttctgaaacattcccgaaagttggaatttaatatccggcttatccgatacgggtactttgtaagccgaatgagactccgctgaaacttcggattcagcggaacgatcttggggcatatcttcttgcggtgtcgttatttcgtcgctcatagagtgtatttggatttataaacgggaaaagcacacacaaaagtgtgactctttttaatttttaaatactcgtgtaactacattcccctgcaaaaatacaaatttaatcgaaaaaaatcatttactttgtgctctaaaatcgtctgatttaagaaagtaatcggctcgaaaataataaaggtaaaaacaagatagcaacataacatacaaaagaaatggcacaggaagacgtttttaagaaattggtatcccattgcaaagaatatggatttgtattcccttcaagtgaaatatacgatggattggctgccgtatatgactatggacaaatgggtgtcgaattgaaaaacaacataaaaaaatattggtgggacagtatggtcctactgcacgaaaacatcgtgggtatcgactccgccatctttatgcatccgactatttggaaagcatccgggcacgtagatgcattcaacgatccgttaatcgacaacaaagattctaaaaaacgttaccgagcagacgtgcttatcgaagattgtatcgccaaaatggacgaaaaaatcgagaaggaggtcgagaaagccgcaaaacgattcggagattctttcgatgaaaaacttttcagagagaccaatccaagagttttggaacacaaagccaaacgagatgagctgcacgctcgttatgcccaagcaatgaacgatgtagatttgaacgaattgcgtcaaatcatactcgattacgaaatagtttgccccattagcgggaccaaaaactggaccgatgtacgtcaattcaatctgatgttctcgaccgaaatgggctctaccgcagatggttcgatgaaagtctatttacgtcccgaaacagcacaaggaatcttcgtgaacttcctgaatgttcaaaagaccggtcgcatgcgtattccgttcggaatcgcccaaatcgggaaagcgttccgtaacgaaatcgtagctcgtcagtttattttccgcatgcgggaattcgaacaaatggaaatgcaatttttcgtacgtccgggagaggaattaaaatggttcgccaaatggaaagaaacccgtctgaaatggcataaggctttgggattgggagaccaaaaatacagattccacgatcatgaaaaattagcgcactatgccaatgccgctaccgatatagaatttgaaatgcctttcgggttcaaggaagtggaaggtatccattcaagaacaaatttcgacttaggcaatcacgaaaaattctccggaaaaaaaatacaatacttcgatccggagttaggagaatcctatacaccgtacgttatagaaacctctatcggtgtagatcgcatgttcctgagtattatggctgccgcttattgtgaagagacactggaaggaggagatagtcgcgtagtgttgcgattaccggcagcgctcgcccctgtaaaagttgcagtaatgcctttggttcgcaaagacggcctacccgaaaaggcacgtgaaattatcgacaatttgcgtttcgatttcaaatgtcaatacgacgaaaaggattctatcgggaaacgttatcgccgccaagatgccatcggcacaccgttctgtgtaacggtagaccatcagactctcgaagacaatacggtcaccatacgtttccgagattcgatggaacagcaacgggtggccatagaccagctccaaaacataattggagaacaggttagcctgaaaacattattaaagaaaattgtagaataaattattcctatccaaatatgaaatacttcgttcgagccattttagcaacgatcatagcggcactactttcttcatgcagttacaacagcatggtcgaagccgatgagaacataaacgcccaatgggcaaaagtagagaatcaatatcaacgtcgcgccgatttggttcccaatttggtcaatacggttaaaggatatgcagcgcacgaaagcgaaacgctcgaagctgtaatcgcagcccgatcgaaagcgacccaaattaccgtagatccggcgaacttgacagaagagaatttacaaaaataccaagaagcacagggggaattgtcgagtgctttgggaaaattgttggcaatcaccgagaactatcccgatttgaaggccaatcaaaatttcttggaattacaagctcagctcgaaggaactgaaaaccgcattgcgacagaacgctctcgctacacggacgcagtgaatgcctataacaaaaaaatccgtaaattccctgctttgattacggcaaagattttcggattcgacgcaaaacctcaattcaaagccgaagcgagtgctgcgcaagctcccaccgtggaattttaatgaatagcaatatacaatgaaaaagttacctatttttttacttatctgccttttgataggcattgtcgcctgcaaggagacagaagactattggacgcagtacgagcaatggcgagagaccaacgaatcatggttcatcgaacaacttggagccaaagatgaaaaaggaaatcccatttacaccaaagtagtcccaagctgggaccacagtatttatgtattgatgaaatactacaacgatacgagcctcaaccgagatgcccaatcgccttaccaaaccagtacggtagatgtgatatacaagggtatgttgtatgacggaactcctttcgattcttcttatctgagaaccgacagtatttatcgtacacaggtaaaacaaaacatcaaaggttggatcatagctctcgaacaaatgaaggtgggagacagttgccgtgtgattattcctcaaacattaggatacggagctcaatatatgtcgtctctgatccttccctacacgactttggtattcgacatgaaattagtcgatattcccgggttagataaaccggtgaccgaataaaagcattctctttcctattattataaatgagacggctgtttttctaacagccgtctcattttacaatatggttcaagataaaaaatcgaggccactttccctctgctctcttttcactatctttgtagaatataggatacggttcggcagagtcaagtcggaaatgtaaattccgcttgcctttgcactcacctttcactatatttgagttgaagctcgaagatactttcgctcggctgaataaaattaaagcgagctttgttttgctccgctctcgcttattcgtatatttgtaggacataggaacagttcagtagagccaagccggaaatgtaaatttcgcttgcctttgcactcacctttcgctatatttgtatgtaaatatgaaaataagctgcacatcgccagaatttcttttctcgaattgcactatttttgtaaagcaaatgtaacacaaaggaaacatgaatgacgtttctttgtttcaataaataggaatcttcatacttttaaaaatctacgaaaatgatatacatcgaaaaagaactcgacgatctgaaaaaagaagtcctcgaaatgtgggacttggttaattctcagctgaaccgtgcaggagaagcccttttgtctatggacaaagagctggcgcacgaggtaacctaccgggaaaaaagagtgaacgcattcgagctgaaaatagacagcgattgcgaagacatcatcggattatacaaccccgtagctttggatttgcgctttacattggccatgatgaagacaagcaataacctcgaacgcatagcagacttttgcgatggaatagcccgattcgttatcgactatcccgaagtaaacattgaatcggaactattcgaaaaaacgggtattaaagaaatgctcgacattgtcaaagccatgatgttgcaagccgaaaatgctcttatcgaagaaaaatcgtccgaagcgatagccgtcttcaacaaagacaaccgggtggacgaactgaatcacgccgcagtccccatcatcgccgaatatttacaacagttccccgaaagagccatagagtgccttaatctcatcagcattatccgacgactcgaacgcattggcgaccactgcaacaatatagccgaagaaatcgtattttacttggacgcaaaaatattgaagcacgccggaaaacgttcttaatcacattacgggaaggagaaaggtctgacaaaataaaatgtttttatcatcttttacagtaaaaaagcgggttactgtcagaagaaaataatatctttgtttaggtaaaaacagagacgtaatttttttgttagccgacaaggtaatgacagccgtttcttttaccagaagccacaagaaacttcgagaacataattaaaaagatgaaacattttatcatagctatcatacttttcttcggtatctcctccatgcatatctattctgctgagacagccacagtagaaattcccgatatggagaaaatagaaaatgccgtccgagatagccgctcgccctattattatcccgacctaatgaaaaaatacctcggcaacgacacgacaatgacgttgcaggatttcagacatttatacttgggatatgccagccaagaagattacaatccctatcgcacagtcgagattcccgaaaggatagaaaaactttatgctcagaccgttcataccgaatcggaatgtgattcgcttatccaatacgcgcgaatcgccttatccgatatacctttcgatttacgacaaataaatttcttgatctacggacttcgacaaaaaggagagacagaagaagccaacctatgggaataccgactgaaaggtatcatacaagccatactttcgaccggcgacggaaaagcgcccgaaacagcttggtttgtcatttatcctgccgacgaatataatatcgtaaatcgacaaggatttaccgctacggaatttacattcgtcgagccttatttcgattacatatcgatagagaagaaccctcttaaaatcgaagggttctatttcaatgtaaaaaaactgctcaaagaatacaaccgtaaattctacgagcgttaatctaaccctattcgaattatactaatcatttaatcatataaaaccattatggaaataaaacccggtaaatttgtagttctgacctacgacctgtacgcaggcgcaggcgaaccggaagaaacattaatgatgcgcgctaccgacgaaatgcccgaccaattcgtgttcggagtggaccaaaatattcttccttccatgttaaaacggctcgaaggattaaaacaaggcgacaaattcgattttgtactttcttgtgaagaggccttcggagaacgcaacgaagaacacgtcatggagttagacaaggagattttcatggtagacggaaaatttgacgaccaaaccgtattcgaaggaaataccgtgccgatgatgacatcggagggctaccgtataaacggctccgtactaaaagttacagacgacaaagttttgatggatttcaatcacccgttagccggtgaaaatctgcattacgtaggtacggtcaagctcgtacgcgatgccacggaagaggaacttcacccccgccatagttgcggttgtggttgcggtcacgatcatggcagttgcggtgacggctgtggagattgctgcgacggttgtcattaaataaaaacaaacagacacataagagcgagggcgggtgcatggctgcgacccgccctcatcgtttcctactaataagctaatatccgattatcaacataaccccgacagcgattatcacagaaaacaggagataaaggaccgaagcccacagtgtgcgccccaacgttttccaaaacttatcggggaaaaacgaatacgccgcccaataagtggggagcaagcaaagaaccatcgaagtccacccatacaccgtataatacgaggcgtccaacacccacccgataggcgttaacaccaacgaaagcaaaatatacaacaccgacaggtaacaacaacccagcagatactctacccaattgtaccgcgcagcaccggccttgcggaaggcaatcttgacagccaacaccatgaacggaaccgtgacgatagtgagtaaagtatagtgctcgacaatccaattgtgagtagccgatccctcgatagtcgaaatagtcccggccccaccctcgatatgtccgaagaaaagaaggattacacaccataccgccagtaacgggataggagccatatagcctttgcgacgtccggcgaagtaatcacttatcagccgatcggggtggacgaccaacgtgcgcgttgtcttaacaaaggtattgtcgacatgaaaaataccatgcagaatattgtcccacacactcctccaagtcaatcgctccaccgtggatttttgaccgcaatggttacaaaagttaccttcaaattcggttccgcagtttttgcaaatcatctccttctcgtcattaaaaatcgggagacaaagatacatcgtcacgcacttctcgccaacaaacaacagcccgaattttcaaaaatagttcgtcgggcggtgtggccggcggttacaggccaaccggatatcgctcttcacggccgacatcgcccccttgtattgcaactgacggcgagcgctctcttcgggttgtttcgtagcaaaccattgattcaaaacatgatgtactatcgcccgttcgagctgatgacaaattgattcatcgagcgccaacgggcgttgccgagacaaaagaacggcaaaaacaagtgctgtttcggtggaaacagactcatcggataaataggcagacaaagaccgcatcatttcgtctcgggcatcggcaagccaacgggaaagaaatggtttatcatcttcggaaaaaattatagaacgactccaccccgacttcaaatcagactgtcccactaaactttttgccacataggaactttcggcaatcaactcacgcaatatctgttcttctgagaatgaaaatacgactgtctcaaactcaaacggattttctacatttcttatctttttcatttccttcttatgatataaaaaaacaatatgacaataaaaatcattaagacacaccccgacactctatgagtgtccatttcctttgaactacgatggttctgttccttctccgaacgagattgtaaggcagctgtctcgtttaacgaatcagaaacggcagtctcgttccgagcgacaacttttttcgattgtttcaaacgagtaatcgaaatggaaggattgacagttttgtcctgcatggaatcgaatacatctacatgtgtccattcccattcggtaagccccgaccattcattccgacacagcgaatcaatgacgacatgtaaatcgcgatcaatagaatgcacgcgattttcccgagcctcaccgattgtctgacgagacgtatgacaagcccaaacaaaaaccggaaaaacaatacacaaaatataaggaaaccttttcacgatacacctcctttttgcatacggtaaattgtcaacagagccgaccgctcggacaaataaaaacgaggagctcgtttttcagccaatatcgtacaaagcgcatcgttaaacgggacttggggacgtcgcctcaaatagctcgccaacatattggccaaatcgttgtacatctctgttcttgtcgatgacacacatcgaggtgaatagcctttgaaaattcgtttcacattccgcctcgcttcctcataactgatatagaaacgaggagctatggaataaaccacacgcctgacaatctgctcccggggaacattcacggccatttttcccaatgatttaagggcttcgttgtatgccctaaacaaatctcggtctctttcttccttgtaatatagttccatataattcttattacaagaagagatacaaaaacatgactttctcaaaagccactacgaaacgggtaacacaaatatatatccaaattggtataaatacaaatatttatggttattttaccacaatattatatttttttattttttcagatgttaatttagagacgagatggagtagaaaatatgtatttttgaggtgataaaccaaataataaaatgaatttcagaacggccatagattttcccggtaatcccggatatatcgaccatcggcaacaaattttgttgctgggatcgtgctttgccgaaaacataggcttatggctgcaacagcgtaaattcaatgttgatataaatccattcggcacattatacaatcccctttccattgcccaaagctgggaacgaatcgtcgaggggaaagcgattattgaaaacgaacttttcgctttcaataatctatggcacagttacgatcaccattcccgattctcggggtgcgacaaaaaggccacattatcgctcatgaaccgccgaatcgaaaagattcaccgccaagtgccgaatatcgaccgaataatcatcacatggggaaccgcttatgtattccgattaaaagagacgggtaaagttgtcgccaactgccacaaacaaccggcctcgatattcgaccgagtgctgttatcggtcgatgaaatagtttcccgatggagagacatcataaaacatatcgaagacaatctacctcaatgtcgtatattgttcaccgtgagtcccatacgccaccttagcgatggagcacacggcaaccaaataagcaaatcgacactgctactggcaataaaccgattgcaacaagagttcgggatttgcgattactttccttcttatgaaatcatgatggacgatctgagggattatcgtttctacgataccgacatgacgcacccctcgaaatcggcgatcgcttatataaccgaaatattggaggaagcatacctttctcccgaaagcaaagaaatagcctctcaatggtacaagatacaaagagctttggagcatcgccccctgatgcccgataaagacgagtacactatttttttacaacatacgctcgacaaggtcatgagatttcaacaaatgtatccttacataaacgtatcgaacgaaattacagaattaaacacaagaatcagtcaaatatgaattacacgattaccgaaatagcaactatcgtcaaggcacaaaaaagagcctacaaagactatactatcacggctctattaaccgacagccgttctctcacgtttcccgaggagactttgtttttcgcattggttaccgaacgaaacgacggccaccgttacatcaaagatctctaccgaaaaggagtacgaaatttcgtggtagaacatcgggtagccgatgaagagcttatgcccgaagcaaatttcatcatcgtaaaaaacacattagatgccttgcaacaattagctgcggcacatcgaaaaaaattcgatataccggtaatcggtgttacgggaagcaacggaaagaccacagtcaaagagtggctttatcaacttctccaaccagactacaatacggtgcgctctccccgcagttacaactctcaaataggagtcccgttatcggtatggcaaatcgggtcgaaaaccgagatggctatttttgaagccggaatttctcaacccgatgaaatgattcatttggaagaaatcatcaaaccgacgctcggtttgataaccaatatcggagaagcccaccaagagggattccaaaccatacagcagaaatgcatcgaaaaactcactttgttgaaagcctgtgattgcattatttacgatggagacaacgaacttatctgcgaatgcgtggagaaactctgcttcgggtgtcgagaaattgcttggtccagaaaagaccgggacaaaccgctgtacatctccaaaataatcaaaggcaacgattctacaaaaatagaatatacttacttgcaataccacagttatattactatcccattcgtagaagatgcttccatcgaaaatgcgattcattgtctggcagtcatgctttactacaaccgaccgcccgaagcgataaccgaccgcatgaagcgtttgactccggtagccatgcgtatggaagtcaaagaagggataaacaattgcctaattataaacgacagctataactcggatatcaattcactcaccatagccctcgactttcaaaatcgaagggcagcagccaaaggtatgcgccgcacgcttatactgtcggacatttaccagacggggctacccccggccagcctataccggaaagtcgccgatatcatattgcacaaaggaatagaacgcctcatcgggataggcccggtaatctcggataacgcttaccttttcaatctcgaaaaagaattttatccgacaaccgaaagtttccttgcacaacttgacccggccgactttcataatgaactgattctaatcaaaggtgcgcgagaattccatttcgagctcatatccgaaaccttagaactgaaacagcatgaaaccatactggaaataaatctcgacgccatcgtccacaattacaacctattcaaatcgaaattacgtcccgaaacaaaaatcatctgtatggtaaaggctttcggctacggagccggttcttatgaattagcaaagaccttacaggacagaggagccgatttccttgcagtagccgttgccgacgaaggagccgaattgcgaaaagcgggaataaccatgcccatcttggtgatgaatcccgaaatgagcagtttcagaacactgttcagctattatctcgaacccgaaatatatagtttcgaactgctgagagcgattatcgcagaaggggaaaaattaggtttagcgggctatcccgtacacataaaaatagattcaggcatgcatcggctcggattcgaagaaaagaatatggaacaagtcgtggaaattctcaacgaccaaaccgtcgtcatcgcccgttcggtcttttctcatttcgcaggaagcgacgaaaaaagattcgacgattattctcatcgtcaaatcgaaacattctcccgttgtgccgactacctacaacaacactccaagcataaaatactgcgacacatactaaacacggcgggaatattacgcttccccgaataccaaatggatatggtaaggctgggtataggattatacggagtctcccctatcgacacaccttgcgggctggaaacagtcagcacattgaaaacaactatccttcaaatcaagacactgtctgccggagaaaccatagggtacggaagaaaaggtgtattatctcgcgattcccgcatagcggcaattcccataggatatgccgacggactcgaccgccatctgggaaatggaaaagggtgtgtcgttgtaaacggaaaacgagctgccatcgtaggcaatatttgtatggacgtatgcatgatcgatgtaaccgatatagattgtaaaccgggtgaccgagttgaaatattcggagaacaactgcccgtcaccgaaatcgcagaaaaactcgatacaatcccttatgaaattctcacttcggtttctacccgggtgaagcgaatctattacagagaataaatacaggcgtcttaggaaattattatacattccttttttacaaaattccaatcgttcaaaaaaacaatttttcttttgccgattcaaaaaaatagaggcccttcggggcctctataaactgagataatactctctcattttttaatttcaatttcttctttcaggtcaatttcatttctctcggcatcataaaatttatattcgagataagcgagagactgattaggaattactttcagctgaaaagtgtatttacaacgccacttcatcttcaaagaaaatacaccttgattgacatatgcagctacaaaaggatgtacgtgtaatgtgaatttctttattttcaacttatacaccagataatgaatcttcgactccaacagatcggtaaaaagtaaggaaggaggaatagtacctttaccatgacaagtcgggcaatcttcactggtaataatatcgagtgccggccgcacccgctggcgggtaatctgcatcaatccgaatttactcaacggcaaaatattgtgccttgccctatcattagccatcagctcacgcatgcggtcatatagtttctgacggttctcggcttcgtccatatcgatgaaatcgatcacgataataccgcccatatcgcgcaacctcagttgccgtgctatttcttcggcggcattcatatttacatcaagggcattgctctcctgatcggaagaagccttcgaacgatttccgctatttacatcgataacatgcagagcctctgtatgttcgataatgacatacgctccacttttaaaagaaacggtttttcctaatgaagattttatttgcttggtaatagcgaaattatcaaaaataggcaactccccatcgtaaagtttaactatatcttttcgatcgggagaaataagactcacatagttgtatatttggttatatgtctccttatcgtttacataaatattttcgaaagaagggctaaatatatcacgcagtatccctacggttctacccgtttcctcataaacgagcgacggaagctgagccttttgcaacttcactaacatatcttcccaacaccttaccaacgttttaagttcgttattcaactctgcgacccgtttcccttcggcaacagttctgacaatcacaccgaaattgcggggtttaatactttgtatgagctgcctaaggcgcaatttttcctcgttcgatttaatcttttgcgatacagatactttatctgaaaaagggattaacactaaaaaacgaccggcaaaagaaatctctgccgtaaggcgaggtcccttagacgaaataggttccttagcaatttgaaccaacacttcttgacccaccttcaaagcatcgttaatcgtaccgtctttttcaatatcgggcaataaatcaaatttagaaagagacaacactcgtttgcgatcggcaagcgactgtttaagaaactttgcactcgaattatattgtgtacctaaatcgagatagtgcaagaaagcatccttttcgtaacctacatcaacaaatgcagcattaagtcccggcatcagctttttgacccgtcccaaatagatatcgcccacagaaaacgatatgttccgagcctctttctgaagctccaccaatcgattattctcgagcaatgcaatagaaatctctttgggttgtacgtctactacaagttcgctggacataaattgttatttagattactgatattcacgcagcatgtcggccttcttaaaaagaacaggcatcctgccaaaagagtttttaatactaaccatttgttatacaaaatggtttcgataaagcagaaagaacaaatctaatgactaaatcgcattaaatttgttcttcgtgttctgtcattcattgagccgacagacattatttcttcttatgtctgttttttctcaatctttttttgcgtttgtgagtagccatcttatggccttttcttttttttccactcggcataacggtatgcttttaaagattaatacttatatttattgattttcttattttacttcacccatgaaagtttttgcaggcttaaatgccggaatgttgtgggccggaattattatcgtagtatttttggaaatattgcgagccgttttctgtgctcttttctttacgatgaaactaccaaaacctctcaggtacacattttcaccttttgccaaagagccctttacactctccataaatttttcaacggtttcaagaacaacagctttttctattcctgtgtttttagaaatttcgtttacaatgtcagccttagtcattttgctataaattataatatttacgaataatattgtttttaattttttggactgcaaatatatagctttttacccatctaaaaaagcaaaaacacttttttttctcaaattaaaagcctcaatccatactgttttgcgagtgcaaatatcgtacttattttttacttttcagcaacttatattattttattcttataggaatgttccactcaccggtttaagacagcaagtaaaaccatttactcgatcgttacatcttaacgaatctgaaaataaaccacctaaataaaattaaaaaaagactcttatataaacaaatttgtaacattccgatttattttcgtatattcgcccttgtaaatctctattctcacatggaaattataattatagtacttcttattttatgtaacggagtactttctatgtctgaaattgcactggtttcagcacgaaaagtcaaattagaaaatagtgcgaaaaaaggtagcaaagcggcattatcagccttaaaactatcacaagaccccgaccgatttctttcaaccgtacagataggtattaccctcatcggaattttaacgggtctttactctggcgaagccttagcccaaagccttgcaaaactattagctaaaagttccttattagctccttatgcagtaggtttggcacaagccatcattgttattatagttacatatttaacccttattatcggcgaattggttcccaaacgtatcggtatgatagcctcggagcgagttgcaaagatagtatcgagacctatgtcgtggttatcgtatatcgcatcgcctttcgtgtggatactcaccaaaagtacagccggggtatgccgtttcttagggctttcatctcaaaaagaaggaatcaccgaagacgaaataaaagctatcgttcgagaaggtacagagggagggtgtgtacaggaggtggaacaagacattgtagaacgagtttttaacttgggagatcgcaatatatcctctatcatgacccaccggagcgatttaatttgtctcgatgtacaagatgacaacacgaccctgaaatcaaagattaccagtgatcttcatgccgtatatccgctatgcgaagacagcctcgataacattatcggaatagtttctttaaaagatttattcggaaagatcgatgataaaaatttcgatatcagagccgtcgcctcaactccctatttcctgccggaaaatatgagtgtatatactgcgatggaaaggctccgcaatgaaaatcaacgctatggattagtaaccgacgaatttgggagtattgaaggaattgtgacgataagcgatattttgggagctttggtcggttctgtatcatcggggccttcggcagatattattatccgggaagatggctcttgtctcatcgacggacaatgctctttctatgattttctggaccactacgacatgacggatcgttatcaagaatacaattacaatactctgagcgggcttatcctcgaattattacagcacattccgaccgaaggagaaaagatagaatggctatgcttcactttcgaaatcgtcgacatggacggagcccgcatcgataaagttctggttcaaaaaaatgaaacggataacataaccttgtaacatcgatctcaatgacaaagaccaaactaaatatcgaatcttggaaccggaaggaacacttccggttcttttctgcttttgacgatccctttttcggaataactacaaacgtagattttactactatatatctcgaagccaaacgtaattctcaatcttttttcctttactcgctccatcatatattgacaaaagccaatgaaacagacgaattcaaattaagaatcgaggaagggaattctgtcgttaaatacgataccatacacgtatctccgacaataggaagagaagacggaacattcggttttgcttttttcgaatatatccccgatcgcaacgaattcattcaacaagcaattcaagagataacaagagtaaaaaacagtacagggttatccttttcgaaaaatacaggaagagaagacgttatcagatactcttctattccgtggttatccttctccgaaatgaaacacgctgtttctttcaagaacggagattcggtccctcgcatatcgacaggaaaactcatcgacacaaatgggaaaatgcttcttcccatatcgatctgtgcccatcacggactcatggacgggaaacatattgcccaattcttaaataaattatccgaaccataaagaatctctgctccccataagtcttccaatcctgtcttgttatgatatagatatactatttgtaccgatggcagagacaaacgaaacgaggtatatccccgatgaatttgtttttaccttcgtttgtattatctttgcacccctaaaagatttagtataaaacaggagaggataaatatcctccgtgtgcttgaacaccacgtaaaaaacaagaattatgaatcgttctttttccctgccctttttaatcatgggcgtcgtcttttgtgtctgcctcatctgctcgaatttactcgaagtaaagatgatttcgttaggaggtattactgcgaccgcaggtctcatcgttttccccatctcttacattatcaacgattgtatcgcagaggtttgggggtatcgaaaagcccgactcattatttggctcggattcctgatgaacttaatggctatcatctttatacagatagcgattatattaccatcggctctattttgggacggacagaaatcgttcgaaaccgtattttcatcaacaccccgcatcttattagcaagtttcatagctttcctcgtaggctcctttttgaacgcctatgtcatgagtaaaatgaaaatatcgagcaagggtaaacacttttcattacgagccattacatcgaccgtagtgggcgaaagtgccgattcgctcttgttttttcctatcgcattcggtggagtagtccctgtaaacgaactattgattctcattgtaacacaagcctgccttaaaacggcctatgaaatcgtcatattgccggtaacgataagagtcgtacgattcgtaaaaaagatagacggcagcgatgtctacgaccagaaagtttcatacaacatattcaagataaaagaactacaataatcaacacgacttattatgaaatcagagacatcacaactgaccctgctgggacataagaccgtgtataaacaggattatgcacccgaggtcttggaaacatttataaacaaacacccggaaaacgattactgggtacgattcaactgcccggagtttaccagtctgtgcccgattaccggacaacccgatttcgctaccatacaaatcgactatattcccggagaacatatggtagaaagcaagagtctgaaactttatttattcagtttccgtaaccacggagcttttcatgaagattgcgtgaacatcatcatgaaagacctcgttaagctcatgaatcccaaatacatcgaagtaacaggtttcttcacgccccgcggcggtatcagcatatatccgtattgtaattacggacaaccgggtacagaatacgagcaaatggcgaaacagagattacaaaaccaccgttaaaccggctcagacttcggtgaacaactttccttgccaagtatcgcgttctttcattcgcttcaacaaacgagccgtaaactcatagttctttatcccccaattcggagcgataagcagttcggccggagactgagagacaaaacgttcgatagcgatgtgcggagacaatcgctcggcaaaatcgattgccagatcgatatactcatcgacatcgtacaaatgaaaatcattcggattgcttttatattcggcagccatacgggtatggagaataagctgcaactgatgcaacttaatcgtgtcgagcggcaaccgggacatcttatcggcatgagataaaatcatctcccgattctctcccggcaatcccaatatcatgtgagcccccactgcaatacccatttcagccgtacgacaaatagcatcgaccgaagcggcaaaatcatgtccccggttaaccctacgcaaagtttcgtcgcaagtactctccacgccatactccaccaatacgaatgtatgtcgggacaaatccgcaaaatattccaacagtccgtcgggcatacaatcggggcgagtaccgacaataatccccacgacaccggggtgaaacaacgcctcctcatatttctgcttcaaaacggcaagctctccatacgtgttcgtataagcctgaaaataggccaaatagtgcatttcaggatatttacgggcaaaaaaagctatcccctcttccaactgggaggtgatactcttccccgtgtggcaataatcaggactgaacgtctgattgttgcaataagtacaaccaccgaccccaatactcccgtcccgattagggcaagtaaaccctgcatgtaacgatattttttggactttacaatcgaaatggagattcaaaaaatcggaaaaatcccgataccgtttttctcccgtcgccatcaatgcccgaattgattataaaattcgactactgcgataattcctttttcatacatttcgatcaggaaattttcattcggcgaatgcgtagcatccgattctaatccgaatcccattaagaccgatttcacacccaaaactttttcaaaagttgctataatagggatacttcctccacgacgtaccgccaatggacgttttccgaacgccagctcataccccttttccgcagcccgataagccggcaaattgataggacatacatagctttcacccccatgcatcgggctcactttcacctttacgctgcgaggagcgacagagtatatgtaatcgataaacatcttggatatttcctcatgattctgatggggaaccaaccgacaagaaactttggcataggcttttgacggcaatacagtttttgcaccttcgcccgtgtacccgccccaaataccgcaaatatcgaacgtaggacgaatggcggtacgctccaaaggtgaataaccaacctctcccgaaagagcctccacatcgatcgccgctttatatttttcttcatcataaggcacagctcccaacatggctcgttcttgcgtcgaaacagtttctactttgtcataaaaatgcggtaaagttatacgaccattttcatctacgacaccggccagcattttgcaaagttcgttaatgggattagctaccgttcccccgaaaattcccgaatgcaaatcccgattaggacccgtgacctctatctcccaataggctaatcctcgcaatccggtcgtgatagacggagtatccaaaccgaccatactcgtgtctgagaccagtatcacatcgcatttcaacaaatcgagatgttccttacaaaaagcctctactccgggggaaccgatttcctcgccaccctctatcaaaaatttcacattacagcgtaacaaaccctctttgaccgcaatttcaaaggctttcaactggataaacccttgccctttgtcatcgtcggccccccgagcccacagtttcccgtcttttactaccggctcgaaaggctcggtatgccacagttcaagcggttcgacaggcatcacatcataatgagcatataccagtaccgtagggaaactcctatcaactatcttttcggcgaaaaccacaggcgaggccgaggtaggcatcacttcggctctatcggctccggcttccaaaagcaaatccctccatcgttcggcacaaagctgcatatcctttctatgttcaggcaacgcactgatagaaggaatacgaagcaacgaaaataactcgttgaaaaaacgctctctatgactgtctatatacttttttgtatccatattttttaatttataatttatgactttgtgccaacaaataataatcgagaataaccattgctgccatagcttccaccacaggtacggcacggggcaatacgcaagggtcatgacgtccttttgccctcaacacggtcgggtttccttgcgaatcgactgtctctatatctttcaataaagtagcgaccggcttgaacgcgactctgaaataaatatcttctccattggaaattccaccttgaatcccacccgaatgattggttctcgctacgattttgccctgttgagtttcgaatacatcattcatttgagaacctctgtatctcacccctccaaaacccataccatattcaaagccttttacagcgtttatgctcaacatcgcactacccaatgcggcatgcagcttgtcgaacacaggctcgcccaaccctgccggaacatgtcgaacgacacaggtaacaacacctcccactgtatcgccttctgactttacttttccgatatattcctccattcgttttgccatatccgcatcgggacaacgtaccggatttttctctatctcgtcgaagtcatatcgattataatcgccggacaaagacaattcccccacctgcgaagtatacgcccagacttctatgcccagccgagttaaaacaagttttgcaagagctccggcgacacagcgagctatcgtctcgcgagccgaagaacgaccacctccccgatgatcccgtaccccgtatttctgggtgtatgtataatcggcatgcgaagggcggaacacctcccgcaaattatcataatccgatgagtgttgattctcattatacacaagaaaaccgataggcgtaccggttgtcttcccttcgaaaatcccggagaggaattctacccgatcgttttctttacgagaggtgacaatcgacgattgcccgggacgacgcctgtttaactctcgctgtatatactccatatccacaggaataccggcaggcataccgtctaccaccccaccgatcgccctaccatgagactctccgaatgaagtaagcgtaaagagatttccgaacgtgttcatctcgattattgtattagttaattaaacaaagatagtacaaactaaaagcaaaaacaatactcgcatgaattataccggtcattctataacttataatacaaatatttatcttccatatagaaccttaatcctatggttacaaatataggtaagagaactaaaaagcgaacggctccatttttgacgatggtacattttccataacatcgaacataataatctcaaatactgttatttattttcaaaggagccatatactcctttcctcaaaaaaataatataaacaaatatcatatcgattttttctttatttttgtaaatcaatttctaaaactaaaaaaatgaagagcattaaaattatgtcttgtatattggctgccggcatgctatttacaagctgtaacatgtcaaataccggaaaaggagcccttatcgggggaggtagcggggccgctgtcggcgccggattaggtgcgattttcggaaaaggcaaaggagctgctatcggtgctgccgtgggtgctgccgtaggaacaacggcaggagcccttatcggaaagaaaatggacaaagcggccgaacaagccaaacaggtagaaggtgcacaagtcgagcaagttaccgacaacaatggattacaagctgtaaaagtgacattcgactcgggaatccttttctcgacaagcagttcaaacctcagttcatcggctaaatcgtctttaagtaaattcgctaacgacgtactgaaccaaaatcgtgatatggacgtcactatctacggatatacagataatcagggctggaaaaactcgacagcagaacaaagttaccagaaaaatctgaacttatctcaggagcgagctcaaagtgtagcaagctatctgctggcatgcggggtttccacgaaccagatcaaatctgtgcaaggtatgggcgaagccaatcccatagcagacaactccacggcagcaggccgacaagaaaatcgtcgtgtagaaatctatttgtatgcaagccaacaaatgattcaacaagccgaagccggaaccctttaaggaataacaccatcataaatccactgacaggtatattctgtcagtggatttataaaatatgagtccaacaactatttatgtcattcgattgtatatacgatataaaatcagaatgagtttctccaaacattaatttgacactaaaaaagatccgaataatgaaaaccgtttatttatttcttgcaacaggatttgaagaaatagaagctctcacgatcgtagatatgttacgccgagccgaaatcgatattacaaccgtttccatatcgcgaaatcttcaagttgaaggagctcatggaataactgttacagccgattgtacatgggtggaactatcgaccgaagatgcagactggttaattttacccggaggaatgccgggaacaaaacacttgggagaatgcaaaccgttggtttctttattgcaacgccaagccgctgccaacaagaacatcgctgccatttgtgccgctccgtcggttctgggtcaggcaggattgcttaacggatataaagctacctgttatcccggatttgagcaattcctcactggcgcaactgtaacaggcgacaacgtgactgtcgaccgaaacattaccacaggaaaaggtccgggagctgccatatcgttcgccacagccatcatcacccaaattgccggggaagaaaaagcccgtgaggtcacgagcggcatgttattgtaaatcttcaaaaccatacagataaaaaatagccccggcattgtcggggctatttttgtcatattacaaattcaactatcgaattatcccacaatagacgaaaccatcttatccaacgcttcggtcaatttgtcggcattctttccgccggcttgtgcgaaatagggttgcccgcctccaccaccttgtatcaacttagcagcatcccgaacaatcgcagaagcattcttcccatcggcaaccaagtcatcgctcagcataaccgtcaatagaggtttatctttatcccgggtcgcagcgacaaaagccaatcctttggagacttcaccccgaagtaaaaaggcgattcccttaaccatatcggacggcatcggaccgatgaaacggataagtttcacgccatctatactctcggccgatttaaccatacgatctttcaagacaatcattttctccttaacatattcctcggcctgtttcctcaattcggcattttcatcgatggctttatgaatcgcttgtaacaaattgggagcattattaaacaagattcctatctctttcaacgaatcttgcaaggcgttcatcgtttcctctacccgagctcctgttatagcctcgatacgacggattcccgcagcaatcgaactctcggttataatttttatcataccgatatttccggtattggatacatgagtaccaccgcacaactcgacagaggatccaaaacgaatcacccggacttcttctccatacttttcaccaaatagagccatcgctcccatagccttagcctcggcgataggaacattacgatgttcatctaacgggatagcttcacgcacttttcgattggctatcatctcgacttttctcaactcttcgtctgtgactttttgaaaatgagaaaaatcaaaacgcaacgactgcggagagacataagaacctttttgttctacatgagttcctaaaacttcacgcagagcttcgtgcaaaagatgagtcgccgtgtgattacatgcagtcgcccgacgtgcctctttatcgataacggcatggaatgtagcggtcacatcttcgggtaatcgctcggctatatgaatactcaaattattttcccgcttggtctgtaatatctccacgatatcatttccagaaatcaactttcctgtatcgcctacctgaccacccatttcggcatagaaaggggttctgtccaaaacaatctgataaaactcgcgagctttttgttttaccttacgatagcgcaatatctcggcgtcgcactcggtcatatcgtatcccacgaattcgggctcaccctctttcaatacaacccagtcgcccgtttctacggcagccgcattacgagcccgttccttttgttgttgcatttgggcgttgaactcgtcgatatccactcctaaccctttttctttcaatatcaactcggtcaaatcaagagggaaaccataagtgtcgtacaacacgaaagcatcccgcccgctaatctcgctcttaccagcagcctttgtatcggcagttactttatcgagcaacttaataccggtttcgagagtacgcaagaaagcatcttcctcctctttaattacttttccgataaggaccttttgagccttcaattcaggataggcatctcccatcgtttcaataagaatgtccaataatttataaaggaaagcctgcttctgacccaagaatgtatacccgtaacgtacagcccgacgtaaaatacgacgaattacataaccggctttcgcattcgatggcaactgcccgtcggtaatagaaaatgcaatcgtacgtatgtggtctgcaatgacacgcatagcaatatcgaccttaggatcgtcgccatatttcttaccgcaaagacgcccgatttccccgataatcggttggaatacatcggtgtcataattagacgtctttccttgcaacgccatacaaagccgttcgaatcccataccggtatcgattacccgagcaggaagaggttcgagcgaaccatcggctttacggttatattgcataaacacaaggttccatatctctatcacttgcgggtgactctggttaaccaatttcaatccatcgacttcggctctctcggcatcactccgcaaatcgatgtgaatctcagaacagggtccacaaggtcccgtatctcccatttcccaaaaattatcatgtcgatttccgttaattatatgatctttgggcaaatgcgcttcccaatacgaggcagcctcgttatctctctccaaaccttcggacgcatatccttcgaatacggtagcgtataatcgggccggatctattttcaatacgtcgaccaaatattcccaagaccaatcgatcgcttctttcttaaaatagtccccgaacgaccagttaccgagcatctcgaacatggtgtgatgataggtatccagtcccacctcttccaaatcgttgtgcttaccgctcactctcaaacatttttgtgaatccgcgacccgcttatattttgccggaacatttcccaagataatatctttaaactggttcattcccgcattggtaaacatcaacgtagggtcatctttaatcaccatcggagccgaaggcacgatctgatggcctcgttctctgaaaaaatccttaaaagattcacgaatctcttttgctgtcagcataacaatttaattatattaagttccacggctttctttttcgttatcgaaatagaaatcgccaatacggtatattaatattaccaaaaacaatttgcaaaaatagcccaaattattatttttgtacccatgtgcagataaaaaaatgcttagaaacatatttttttacggtctataaaagcttttgccaataagaatgagccgacaaataatcaatgagtaaaaaaatattctacatatacaatcctaaaacactgacatacgaacgggtatatccttcacttcgccagcgcatcatcgttgttttacgccatttgttcgtcggtagcatactaagtataggggtcatcgtcgcattttatttttggttcggttcgcccaaagaagagcttctgaaaatggaaaacgagcaaatgcagacacaatataaagtgctttccaaacgagtcgatgcagcgctggaagttctgaatgatttacaacaacgagacgacaacatgtatcgggtcattctgcaagccgagcctgtaaacgatgaaatcaggaataacggaatatacaatcccagccggtacgagaatctgttgcaaatgagcgatgcagagctggttgtttccaccagtcaaaaagtagacaaccttgcgaggcaagtatatgtacaatgcaattccatgaacgaactcgtcaaactggcacaaggccaagaggagcgcataaaacacattccggccatacaacccgtttctaacaaagatttgaaacgaacagcatcggggtatggttatcgaatagatccgatctacaagaccacaaaattccatcagggaatggacttttctgccaatgtgggaacccctgtttacgtaaccgggaacggccgtgtcattgaaaccggctggcaacaaggatttgggaacacggtagtcatcgatcacggatatgattataaaacccgatatgctcacctcagtaaaatattagtccgtaaaggacaagaagtcatacgaggagaagaaatagccgaagtaggcaatacggggaaatccacagggccgcatttacattacgaagttctatacaaagggaaagcacagaatcctatcaattactatttcttcgacctttcacccgaagattacgaccgcatgactcaacttgccgaaaatcaagggcgtgtaatggattaaaaacaaatcgtatgaaagaacctgtaacaaataaacaaaaactatattacacgatcggtgaggtatcggacatgttcaatgtaaaccaatccttactccgatattgggaaacagagtttaaaacaatcaatcctaaacgatcccccaaagggactcgttattattcccaaaaagatatcgaagaaataaagctcattcactatttgctgaaagaaagaaagctgaaaatagaaggagcgaaacaagtgttgaaacacaaaagagaaagtaccgttcggtcccaacaagtagtggaacgactgaaatcactgcgttccgaactaattgccattatggaagaactggaatagcttggctattaagaaggaagatattgacaatttcaagaaagtttcttacacttcttaaacaaatatggtacactattcacaccgaggataagccccagaatagccccgcaaccattggcgagaaaatcataccagtccgcgcttcgccccatagacatagcaccctgcaacaactccatcaagccaccccacacaatagccccgcacacgagcaaaatcaacttgggagcggtaaacttcgatacccgatatatatcgaaacagcctatccaaacaagccccaaatacatacaaccgtgcaccagcttatcggctccttcgaataaataaaactcctgactatgtaccggattcttagccagagacaaatatgtaattacaaccaatactataatcgtagggacaaacgccaaaaatctaaaaggcctcatatctattcacgtaatctttacaacaaacaaaaaggtacaattatctcctttttacagaaatacttgcttttgcaatcctttgacaaagataaagtaagccaagaataaaaacaaatcacccgatttctgccaagaatcaatctacctgtacctcctgtcacaaaggccgcattttcatttacgacaaaaccaaatccatttgtatttggttatataatctatcattcattttttacaaaaaggattacatttttatagaaaaagggctctattccctttttattaagctactatatgaacaaataaattaaaattttatacttttgtaattatatcttgaactaaaaatgggagaacgggcaaaattcgcgaccaagttaggagtaatagccaccacggtaggatcggcggtaggattaggaaatatttggagattcccttatgaagccggaatgaacggagggggagcattcttaatgatttacattctatgtgttcttatattaggtgtgccggttatgtgtgccgaattcattattggaagaaaatccaaatccgacacggtagacgcattcaaaaaattaatccccggcagtcgatggtactacatcggatatatcggaatattggcctcgattcttattttaggatattatatggtcatatcgggttggacgctcgaatatctttttcaagcagcctgtaacaatctgaccggaaaaacggcagcagaattcaaagctgaacaaaacgcatttatccagaacgattttcggccgttactatggatatacatttttctctttatcaactatatcatcatatctaagggtgtacagaaaggaatcgaaaaaatgtccaacatattgatgcctatactgttcattattctcatcgttttttgtatacggtcgttaacactacccgaagccaacgaaggactgaaatttttcctacaccccgatttttcgaaaatcacaccccaagtcatcgtacgggcaatggggcaagcattcttctctttaagtttaggtatgggtatcctcatcacctattcctcctacttcaataataaaactcatctgataaaaacagccagcacggtagcgatactcgacacaaccgttgctattttggccggagtaattatattcccggctgttttctcttatggtgtggatcctgtcgccggtcccgaccttgtatttgtcaccctccccaatgtattcaatcaaatgccggtatctgcgttatggtctgcattgtttttcttactcctcactgtggcagctcttacttccaccgtttctcttttcgaagttgcagttgcattttttatcaaccacatgcatctgtcaaggaaaaaggcaacccggacaatgatggtcattgttgccatattaagcactatctgctctctttctatcggttcatggagccatatacgcatttttgagaaaaccatattcgatgcctgtgattacttctcagctatcatcttgttgccagtaggcggactgttgataagtattttcatcgggtggatactgaaacgaaatatctcccgggaggaattgactaaccgaaataaattgcacgagccactattcaacgcaatctttttctgtatcaaatacatagctccaatcatcatcattttaatctttttatcaggatttggtattatctgatggcacttaaaaacgattcttttttctcattatcgaaaagcgaacgcagagcgactctgttattgattatcattctgttaatcctcacaggagctcgcattgcgcaatactactatcattcacgagaaaaggttgaagttacaatggaatacgaatcatttcaatccgaactggaagaattcaatcgttctttgaaccatcaaaacgaaaaagcaaaaaatgccgaacggcaatcatctaaaagttcccgtcctcctaaaagtttaaaaccagttccccgggaagaatagtgccaaagaagtttttttaaatccataccttactattcaacaaaaagaattatcttcgcttaacataacagcaggccggtatgcaatgcctgtatcggcaggtcttgttatatgatttcaaaacgtacagcactatgttccagtggatacaaaaagaaccgttgtctttgaatcttggtggagaattggtttccctatcgagaccattaatcatgggaatactcaatatcacccccgactctttttaccccggaagccgtactacggaagaagaacaaatcgccgagcgactgcataaaatggtgaatgaaggcgccgacatcatagacataggagcctactcctcgcgacctaatgccgatgacatctcacccgacgaagagatgaaacgactttcgaagggactcgatattatccgcaaactatatcccgatgcacgagtttcggtcgatacatttcgtgccgatatagccgctcgctgtgtccgggaatacggagtacagatgatcaacgacatatcggggggagagctcgattctcaaatgttcgaaaccatagccgagttgaaagtcgcctatattttgatgcacatgaaagggacgccccaaaccatgatgcaacaaatccgatacaagcatatcattcccgaaatgctttactatttctcagcacgtatcgcccgactcgaaagcctcggtatcaacgatatcatcatcgatccgggattcggattcagcaaatcggtcgacgacaactacttgctcatgaaccgactcgacgaatttacccgtataggctatcccttattggtgggaatatctcgtaaatcaatgatatataaacactttggatacactcccgaagaaagtctaaacggaactacaatcttaaacacactggctttattaggaggagccgacattttgagagtgcatgacgtaaaagaagctgtggaagcggtaaaaatagtttcaaaaaccatacaatccgtaaaataaaatgttctcattcggcataaaagatattatcgacatactcatcgtagccctgcttctgtacactctttacaaaatgatgaaagagtcgggaacaataagcatattcaccggcgtattagcattcgtgggagtatggatcgttgtaacgcaaattctcgacatgcgtctcatcgggtctatcatggacaaatttatgagtgtaggtctccttatactcgttattttgtttcaagacgaaatcaagcgctttctcgtacaactcgggtcgcacaaacgatggagattctttttcaatttcttccttaaacacaaagataccggagaaaagccctatatcatgcccatcgtacatgcctgtatgaatatgtccaagacaaaaaccggagccctgatagtcatcgagcaaggagtttcactcgataattacaaaaataccggcgacacgatcaacgcaaatgtaaatgcaaggctcatcgagaatatatttttcaaaaatagtcctttacacgacggagccatgattatcgccgatgatcgaatagcctcggcagcttgcatattaccggtctcgcacaatacgagaatacccaaatcgatggggctaagacatcggtcggcattaggtataaccgaagtaaccgatgcccttgccgtcgtcgtatcggaagaaacgggaaatatctctttggctcacaatggaaaaataacgaccaaaatctcagggaaggacctcgaacgtatgctggcacaagaatctattgattgactcaaaacatctgaatcgaaacaaaatcgctccacggaaatcgttcagcataaatcacgcgagaacagctcgggacatgaagaatcacttccgacagaatggacggattaaaaccatcggccaccgcaggaggtatcggagcctcgatataaatatctttcaaccggagacagcctgtaaaaagatgatcgccgatacacgtcacctccttaccgaaaaccacagtcataagagtcttgattttgccgaaagaaaaattttcaaatttcaaatccctccccacataaagtttttccaaaggacaattataaaacaaattatctcccacctgcaaaggtttattcccatcgacaaatatcgcctctttcaaagaaatacaactcctgaatgcgtacactcctatcgtgttcacatcacaccctatcgacaccacccccaaagactcacatctataaaaagccaattcacctatatcccgaactttatccggtataacaaccgacgacaaattataacaacacccgaatgctccttctccgatagacaatagattatcgggcattatcacccttgtcaatcgagcacatttataaaaagtataatctcctatcttattatccgaggcactataattcccataataggtatttcccccatctacgatatttacccccgacaaatccaaaacggacaaacaaccgcctgtctcctttccgtttgcatcacacccgctcatctcgcgaatgtatcttaggtctgtgccatttaattcccctatcagtgtaagctctacgattctgtatttcaaatgagacgctatcaacgacggtagtgtaccagcttcattcacacaaataaccatactcttgttactgggccttaatcttccgatcaacgcccttaacgaccacataacacagttcaaatttttcataaatgcaataaactctataaaagaacaattcccccaacaattaaaaatataagaaatcgtttgcccacccaatagaaatacaaactcagtatgacaacaacattatacgcaccccaaacgtaaattcgactccgtcaaaaaaaactttattccctctttataaataaaactaaatgcttcaacacaacacgatcgctatacttctaagtaatttttgtatagcgtcacaaatattgggaatggtgagtgcagagacaaacgaaaatcttatctccaacttgactatgccgaaccatatcctatattcgtatctgcaaatataataaaatctgttataacagatatgaatcctatttgtaatacacaattttatatatattatatagattcagtcgataattgatggtgattttccttgtatatcctaatccctctcctatatcgctaacgcaacacaggggagaaggggtaaatacaatcccattcaattcgctaaattaatgtggcagaagatagctatccccacttttctactgccccattatatatcgcatttcttgaacttattaaaacagttgaggcgtagaaaatattctacgcctcaataccctatttatattgtaactattttatcgattagcccgtttacgctccgtctcatctaaaataattttacgtaaacgcaaatgatgaggagtcacctccacatattcgtcttcttttatatattcgagagcttcttccaaactgaatataaccggtggaacgatacgagccttatcgtctgcaccagaagctcgcatattcgtcagtttcttcgacttggtaacattcaccactatatcgttatccttagcattttccccaacaacctgtccggcataaacttcttcctgagggaaaataaagaaccgacctctatcttgcaacttatcgatagcataggcataggccgtacccgcttccatcgcaattaacgagccgtttgtacggcggtctatatcgcctttccagggctgatattccaaaaagcggtgagccataatagcttctcccgccgaagcggtcagcacgttggttcgcaatccgataataccacgcgaaggaatatggaactcgatgtgtatgcgatcgttctgcgtagtcattgataccatctcacctttccggcgtgtaaccatatcgataatcttgctggcatattcctctggaagattgattgtcaacaactccaccggctcacatttctgcccgtcaatttccttaataattacctggggctgtcctacttgcaactcatatccttcacgtcgcatagtttctatcaagaccgacaaatgtaacactccacgtccataaacagtccacgcatcatcggtatcaccccgctccacacgcaaagccagatttttatccaactctcttgtcaaacgatcggctatgtgcctcgaagtcacatattttccatctttaccgaaaaaaggagaatcattaattgtaaacaacatagacatggtaggctcatcgatagcgattctcggtaaggcctccggtttgacgacatcggctatggtatcgccaatttcgaaattttcgataccaatgagtgcacaaatatcccccgaacctaccgactgaactttggcacgtcccataccctcgaaaacatcgagctctttaatccgctgtttaacgaccgatccgtctttcttacacaaggccacgtccataccctctttcagctcaccgcgatgaacacggccgacagcaatacgtcccacataaggagaataatcgagcgaagtaatcaacatctggggtgtaccttcgagatactgcggttcgggtatatactcgataatcgcatcgagcaaagcggttatattgtcggtcggtttcctccaatctgtcgaaaaccaaccctgtttggccgaaccgtatatcgtggggaaatcaagttgttcttcggttgcatcgagactaaacataaggtcgagaaccatctcttggacttcgtccgggcggcaattaggtttatccactttattaatgaccacaaccggtttcaatcccatttcaatagccttctgcaaaacgaaacgagtctgaggcatagggccctcgaaagcatcgactaacagcaaacagccatcggccatgttgagtacacgctctacctccccaccgaaatcggcgtgccccggagtatcgataacattgatcttgtaatccttataacggatagaaacattcttcgaaagaatcgtaattcctcgctccctttccaaatcgttattatccaatatcaactccccggaattctggttctcacgaaagagatgcccggccaataacattttatccaccaacgtagttttaccgtggtcgacgtgagcgataatcgcaatgtttctgattttttgcatataacctattttaaccgcgcaaagttactacatttttttaaaatggtatatcactttccttcatttagtacttaggagactttgcgagcgcacggaacaagctataacaacgatgactttctatctttgatttttaaataaacatatctcaaacccggcaacaacggctttacaatagtactcaccataaaaaacagccggggatatctcccgataaatgaaaccaacttgtctttacaaggtaacatcggttgataagttactaataattcttttctatctttatatgacaaacgccaccaataacgaagaatattcattttatacataaaaaagtgatgtctcataatacaattggaaacatctttatcttgttctttataagctatttccttaattctatcactttgttcgaaaaagtttacaatcttattcttttcacatctaatttttgttgtctgagaatcatacataatataattatatacaacaattgcagcatattgaattcgattcgctattcttatacaattaataatatagtctgcatcttcgaatctaacattttctcgaaataatatgttattttctaacaaaaacaaccgacgatatgcacaaagccatgagctccatggaattgaattccttttgataaaatcgtgtcccgacattacatcttgactatcaaattcctcaattatattctttgtagaaccattacgttctacaagggcataatcaaacttcaaaatatccaaatctttatttttttctataacattcctaagtaaaggcaatgcgttcgactcaaaagtatcatctgcatcaatatacaaaatataatcacccttagcaacttttacacctgtattgcgagcgcttccctgtcgtcgatttgtttcatgattaatcaatcgtatattttgatgaaatttcccatattccgaaataacctgtgccgtattatctgttgaacagtcattgacacaaatcacttcaaaatcatcgtcccccagtccctgccgataaatgctgtccaaacaattttttatatactgttccccattatagaccggaataataatagaaaaaaacacacccataacaaagcatttttagtatgggcaaaagaacaaaacaggattaaatatttttaaaataatatatcgctgcgatcgctacgattttgtagactttttagctacacccttatcgaaagactgggtatattccgaaaaaaaatcgtaacctaaaatacaagagatacgatataacatcgatgaatcgatactcgatttttgaaaaattttatacacattggttctatcgcaatgtaaggcggtggcaaaccaagtaactgtacgaccttgttcgcgcaactttttttctatgagagaaccgatgtgtatcatcgtatcgacatcgtgcgactcccctacacgagctaaacaaacacaaaaaaggcgtgagaatcacactcctgcctatctcggtgtcaggctctcgcatcgcccttctatagagataagcaacgctgaaagcccacgccgatatgcatatacggcatgcgataaatcggcacgccctactatacaacatatcccgtagacgttcggttgccctcatctttgtatagaagttcaaatttgcgagattcgacactccaaagacaaacgcttgtaaacgcctttcctaataaaaaactccacccctccatctggtttgaaaacaaacaagacatatcccgaaaccggggtattcagcgtgaagttttgcaaatatagcgaaaggtaaaagaaagacaaaatgaacaaattcatttttcatttcaaagcgtattccataagttagaaatgagaaaacaatcgttttcccgcaactatttaatgaaaataaaaagacgaatatctgctaaaaaagcagacttcatctttacctgacaaatcatatacttccgctcaaaacgagcagttgaaaccgtctatattctaagaaagacatttcgcttatacaactgtcggagtataaaaaagactatgagatagttggagaaacacagccataccgaataataatcacccaaataccgctccaagccataactgaccgatgccactacgcaccggaaattaacaacctcccccaacagataagccgttatagaattcataccatatattttcagccagttcaatccccaatcatggcctttacaatctatccaataataaaacaaagccatcaataaaaaacaatatccgccagacagcaatgtcatgctacaagtccatatacgtttgataaccggcatttgaaaactccatgcccaagccgcaacgataagggccacccctaccaaaaacaaccggcgagccaccttctgccgatgaaaagcaccctctttcatcattcgacccgcaaacacgcccaacataacggtaaccccaaaagtgagactgctcaatatccaagtgtaatgatagtccgatgagaagctccatgtcccgtctgcattccaataaacaccgtcacggaatcggcccaagacaaaacgatccaccctctcggcaaaattcccttccggtgtgaaatctccaaaaaatgtcatagggaaccaataggccaacaacaacagaaacgtcatacccatctgcccttttaaagaaaagttcaattgaatgagcgcagcgatcaaatatccggcagcgatagcctgcaacgtgtttgaatacaagcgaatatatttaagatctagacccagcaaattaccctgaacaaccatgcccaacaagaaaagtatggcaaaacgtctcaatacctttttataaatgaaccaccggctttccaccctctcatacttcgaaaaagaaaacggcatcgaaacacccgtcataaaaaggaacagcggcatcaccaaatcccaaaaacgaaatccctcccacacctcatggtcgaattgatacaaaacggcattcatcacagagctatccacacatgctcccaacgagaccaatacaggctgtaaaaacaccagtaaaaacaagtcgaatcctcgcagaatatccaatgatgccaaacgctggccgactggttgtgtcgcatttcccaacatacaagaattaagattattataaaacaataataccgatatttctgtttccaccgcatgcttcgatcggatacaaaaaaaacgatatttacaaatacaggggaaagtatgtgcagaagcaaacggaagtctcattcccaacttgattacgcccaaccccatcttatcccctgcaaagatagcgaattgccacataagagacaacctgtttataaacatggcctacaaacaccgcaaaaaagaaaaaaagagaatgaaactatttttgaaaatccgaaacaaatgcttatctttgtgcactcaataatttattaacaacaaaactcaaagaaatgtatttagattctgagaaaaagaaagagatctttgagaaatacggaaagtccaatactgatactggctcacccgaagctcagattgcattattttcctaccgtattgctcatttgactgaacatttgaagtcaaatcataaagatcatagcactgaacgagctcttaaaatgttggttggtaaacgtcgtcgtttgctcgactacctcatcaaagtcgacatcaaccgctaccgtgccatcattgcacaaaaagagttgggtatcagaaagtaatttttcgctacacagcaacaaaaaagcgattcgtattttccgaatcgctttttttgttacctcacatcgacggtaaaccctattcgcagttcagtcgatcattcgtggggatatcggctcaatagaaaatcagaggggattatctttttacctctcccataccgctaacgcaacacaggggaaaagtgcacaatgtatccttataccgaaactgaaacgccactttcaatcctctcccccctgtgtttccataaggaaatatagggggagtgcccgtagggcgagggggttaaacaacagtcgagcgaagatgcaaaaaaattatacacaccgcccctccccgaatcgcaaacgagttactaataaacacaacaaagctacggttttaaagaatatattctttaaaaccgtagctataaatcccctccgtctatattctttccaaaaccgtttgaataagatccgatacggctgttttataattaggattagcatgatgtgctaccctattggcaatgatactacacacagtcatcgccttgtgccccataagtttagccaaacctgccaatgccgagctttccatttcataattagtcacgacctgcgaaccgtatttaaaagcctctattttcttgttcagttcagggtcggccaaaggaattctcaattccctgccttgtggcccatagaaaccattggcagagatcgtgacacctcgcaccatatcgtcaccgccgatacgagcgaccaattccgaatcggcatctactacataaggagcagcccataaaggattccacttcacaaactcacaaaaagctctttcaaaatcaaggtcacagaccctatcccgaccggcataaaaattaagcacaccatcgaaaccgatagatttctcggctattacaggggtcccgattggtacacgaggctgtaatcctcccgaagtacctaccctcaccagagtcaactgtcgaaattgaggtttctcataccgagtggaaaaatcgatattcgccaaagcatcgagttcattcactacgatatcgatattgtcggttccgataccatgagacaaacacatcaccgatttacccttgtaagtaccaccaatcgtgtgaaactctctgctcgaaacttcaaattcacgtgtatcgaaaaacgatgcgaccaaatcgactcgtcccgggtctcccaccaatattattttatcccgcaactgttcgggctgcaaatgcaagtgaaatacactaccgtctgcattgataataaactccgattctggaaaatgtttcatatatttcttcttttatactaacacatcattgcgtgatagcaaacgaatatacagatataaatctgtatattcgaaatggtttattctaattatatataaaaaacatctctttaagatataacacccgtactctctatcaaaaaaaggttcgatatatacaaatttccactcaatctttcttagaaacgactttctttgaactttcagcagcctttgcctccttcgctttttttgcttccgctcgtttagagtgtcgctcaatccgagccgatttcagctccttttgcaacatctctatttcggccgactgattccgaatcgtcgtcaataaagcattcaactcttcgttttctatcgattcgggatattgcgcttccacccgtacgataaaatcgctgagcacattcatgtaattggtaaaagcctcatacggactatcgtaagggctgtaatggctatgcacagctccgtcagacaaatacttcgtacacatataatagaagtggtcgctggcttgtaaataataccagtcttgtttcaaacgacggtcgtcacacaagcggacgcgctcggcaactgaatagagcttgcggaacgcttcgttctgcaacgtgtttcccaaccatgcactggtgtcccgtgcttcgtcggcccacgacatcggataaggaaccgacagcatatcgaccggtttcaatttactgatcgcctcggtcggcgtgcagaacccgacaccctcttgttcggcaaaacgaggaagggctttcataaactcgaaaatacccgattcgcgaggttgcagttcgcccaatgtttcgtaattcatgaaaagattgacgataggttcttcttcgggataattctttacccacgaaataaacttctctgccgttaaaggataatcgctccattcgtaattagagaaacggaatgaaatatcatcactcattttgtaatttttcaacaacattttcagcttgggagcagctgccgaactatacaaataattcgggctcttccaacccaaaatatgcttcgcgccctctgtaataacgcctttgaatcccatcgaagctatcatagaggctatgtcgtcggaaaatatcaactcggtatttctgaacactttgggcttcacgccgaaaagctgctctatcttctcgtcgtgttgtctcacctgcatcttgaactcctccggatcgcacaacgatgccaacgagtgcgcataagtttcggacaagaactccacacaatcggtcttgaccaattctttcatgctgtcgataaattcaggcacacaaacttcgagttgctccaaagccacccccgatatggaaaaagccaccttgaacttaccattggcatttttaatcatttcaagtaatgtcgcatttgccgggaggtaagaacgctgagctatgcgagtgataatatcgtcattggcaaaatcatcatagtaatagtgatcgttacctatatcgaagaaacggtatcgtttcaatcgaaacggttgatgaatttgaaaatagaaacaaatagttttcatataaggtcgagttttttcattagttattattgtgcattaccttgtggtaaatatcgattactttctgtccggcatatttccatttgatttcgttcacctcccgctctccttcttcgcgcagttgcttatagatagcaggataagtgattatagaataaatggcatcggccatagcatcgatatcccaatagtcggtcttaatgacattggtcaaaatctcggcacaccccgactgcttcgaaataatcgaaggcacacccacttgcatggcttcaagcggagaaataccgaatggttccgaaaccgaaggcatcacatacacatcgctggccttcaacatttcataaacctgctttcccctcaaaaatccggtaaaatggaaacggtcggatatattacgctgagccgacaagagaatcatcttatccatcatatctccgctcccggccatgacgaacctcaccctattggtcttcttcaacacccgcgccgcagcctccacaaaatactcagggcctttttgcatggtaatgcgtcccaagaaagtaaccaccttttctttcggactgtgaggaacttctatcgatttaatctcgtcgctcaaaggctctacggcattgtgcacggtcgtcaccttcgccggatcgatatgatacttttcgataaccgtctgacgagtcagattacttaccgtaataatatggtcggcatgcaacataccgtcccgttcgatattatacaccgtaggatttacattaccccggcttcggtcgaaatcggtcgcatgcacgtgaataaccagcggtttaccgctcacttgcttggcatgaataccggccggataggtgagccaatcgtgggaatgaatgacatcgaactgaaccgtacgagcaatcaccccggctacaatcgagtaattatttatctcctccatcagattatcggggtaacgtcccgaaaattcgatacaccccagatcattggttttcagataattaaaatccgcataaatatggctgcgaagatcgaaatattcttggggatccatacaatagccataacgctgctgtacataatcccaacttacatctctccatgcgacaggtgtattcgcagctccgataatatgggcaaaagttttatcctcgtctccgtatggtttaggtatgacaaacgtgatgtctatatcgccacactctgccatgcctttggtcagcccataactggccgtacctaaaccacccaagatatgaggaggaaactcccaaccgaacataagcgctttcatagataggaatcaggctttacatgttatactttttcaataaattcaatactctcaatatttcaccgacattggcggcatagctgatagctccccggcctgcgaaaggtggattcccgtcgaacagctcggagatagagccaatgcaagtctgagacatttcatcttcaaaccctatcagcatacgttccaaaaacgataccccgctaataccgaatatcttcaaataggcatcggcatacgctcccatcaaccacgggcgagcaggtccttgatgataagcatattcgcgttcggtctgcgaccctacataagtaggattgtagccatagctcttaggactcagagtgcggatacctttgggggtcagcaattcccgtgtaaccacttccaatgcacgtttcctctgccgtttgtccaacggagaatagtcgagcgacagagctatcaacatattggggcgtacgctccaatcggacatcgcaccgtccacatagtctaccagataaccataatcgttcaagaaggtatgtacaaacgactctgccgtcttatcggcgatagcgttccactgctcgactttcgatgccatctctttgtcttcggcaaagagtgcggcggcaaacctcaatccgttataccatagcccgttaaattcgaccaaatagccgcttctcggattcacgggacgtccgtcgacaaccgcgttcatccatgaaattacccgttcctttccattggaataaagcaatccgttatcgtgcaagaacaagttgggatgcccacctttcacgatataatccaaaatatcgcaaacaaacttcccatatttctgtcggcaaatctccatacctttctctttggcataatgatacacagtccataacgcccacaaaggaatatccggcaaatctatttctccgatattttcatcgagctctccgctcgacataaagtgacgtaacgctttttccgacgaatgcatcacatcttcaaaagtcttgtcgtctccgacagccaacgtacatcccggcaaagcgatgaactggtcgcgagcccttactccgaaccacggataaccggctaataaatagtgaccttttttagttttgaaataaaactgctgagccgaatttttcaagcaattgaagaaactggaccgacacatgtgacggttggcgagttcttcattgtaagtacgggcgaacgaacgcggtttcgcttctatcgtaccggccgagaaaataatactctcgcccttttttatcgggagctcgaaataccccggcacatataaatcttcctgataaggatagccgcgttcttgatccttgatatactctatacctttataccaatggggatcgaatataaactgaggagccttattaaattgcatatacaaccggggatacccctgatacagacagcaacttattccattcgccacctcctcgtaacgttggtcgagtacgtaattctcgacacacagctcgttggccttacgaaacgccagaaacggacggaactgtaacaccgtaggggaatgagcatcgacaagagtatatttgatcaatatacggttttcatgcgaaataaacactttctctttggtcataattaccccgcccacgcgatacatcgtttgcgggacagattcgcaattaaactcccgaatgtatttgtgtccgttaggactgaaacaatcgccccgatatttatgcaaccccaagttaaaggccgctccatgctgtatcacggtttcgtccaaagacgatagcatcacgtgattatccttgtccaactcgggtatcgggataaccaacaacccatgctgttttcgagtattgcaatcaacgattgtcgtacaatgataggcccccgacttattggtccgcaacatctctttcggcaaagaccattcgagatttatcatcagattcttgtcaaatttcagataactcatatctctacaatcaaatttctcttattcctttctaaaaattcccgaacgaacttataaccgtaaatgttcacaacctacaagttttcaaagaatttgaaataagctattaatattgttacgaatttaacataacagaaaataaaatgcaaacattttgacagcgaaaatggtatgttcttaaacatatagttacaatcggcaatatatcaacaccttataaccgttctaaaacaaaaaaggttccgactttcatcggaacctttttcataacactcctttgtttatagtttcaccaaacgtacgactttatctcccgtcctcaccaaataaacaccggctaccagtctcgacatatccacgactgtaatttcttctgtcggatcgataatcgaaacgatatgcccggctattccatctacatatctcataaaaagaggggtgacgaaatcgccacccctcttttcaaatatataatcggtatgcatcagaatgattcgagagcaatggaaagattctgcaaaaacatgcgaaccgaaagtgccaataaaataataccgaagaacttgcgcaatacataaacccccgttttccccaaagcacgctccaaaatatggacattgcgaataacaacataaataacaagaatattcaagaacaaagcggccagaatactacctaacccatacagagccctcaacgacaacagagtagtaaaagagccggcgccggcaatcaaagggaaaacgatcggtacgatcgatgccgcaccctcgggcccgtcattcctgaaaatctccaccccgagcaacatctctatggccatcacgaagataaccagcgcgccggcaatggcaaacgaagaaatatcgacttgaaacagattgagtatcatattccccataaacagaaaggcgaggaatgtaaccaacgaatagactgccgctttccaagcgataatattttgtcccttctgcttcatatcgataataataggagtaagccccgttatatcgattacagcaaacaaaataataaaagcactcaggaaatcctgaaaacgaaacgatattatttccatattctacatagtttaaggtgtacgacgacaaggtaaatacaagagtctatatacactcacatttacacgatttctatcttatccggtacaaagttaatgaaaaaaaaagaaatgaatagtttctaaacaaagaagatgttttagcttttataacgaaacatagtaaaaaaattttgttagatttgaagaatctaatcgtatagcgtatggacagcatgtatgatgttttattacagctccctatttttcaaggagtcagccgaaataaaatttcggaattaatcgagaaaatgaaatttcattttctcaaatatcccgacggagaaaaaatcgtcacgagcggggaagaatgcaatcatttgaaatttctcatctcgggagaaattcgctccgaactgattacacaaaacgagaaaatgagaattacagagctgatacaagctcctaatgtaatagctcccgaccatctattcggccgcgacacctatttcccggccaatctttatgccgtaggaaccgtaggaatcatgcaaatagaaaaatcctcggttatacaaatgttacaagaagaacctatcttcctcatcaatttgttgaacatactctctcgcagatcgcaaaaggcactcgaaagttttacggctctttcgtccaacgacctcaaagaacgactggcattttgggtgttgagtctcacgcaacaaaaatcggtcgacatacgcatcatctgcaaacaaaaagatttatacgctttcttcggtgtgcaacggtcggtattcctgtctaccctcgatgaattgaaagaagacggtatcatcgattacaatgcaaaagaaatcatcattttagaccggtcccgattaaaagatatgttactcggcacaagcaaagacgacttttagcatatcccctatcccattttattccacggagcagctttactgctccgttttttatatcgttatccggcaatgcccaataacgactcaatagggatttaaacctcctccctgccgtgtcccgtagccttacggggtgctttactatgcaattataggggaggaagttgaataacttgttacataaaagttcgccgaactgtaacaaaagtatgaaatgtgtcacactcctcctctgtgtggcgttagccatataggggaggtgtccgaaggacggaggggttaaaaaagacaggcaggagggataggggggagaaggttgaatagcttgttgcataaaaaaagaggctcgcacacggcaagcccctttttcgattatgtgaaagactgaattttaatcttcctgttcaacaccccattgttgttttgccaaacgacgatagttattgtaacgccacttagcattgtcctcggcagctttgaacaattccgcagcctccgaaggatattgtttcatgacagaagcgaaacgaacctctcctttcaggaaatcttggaatttttcccattgcggttccttgctgtccaatgtgaacggattcttgccttcggcttccaattcgggattgtaacgccacaagtgccagtatccgcatgctacggcagcagcttcctcggcctgagccttacccataccagccttcaaaccgtggttgatacagggtgcataagcaatgatgatagaaggaccatcataggcttctgcctctcggatagctttcaaggtctgagcttgatcggctcccatagccacctgtgcacaatatacatatccataggtcgaagcgataagaccgaggtctttcttacgaacccgtttacccgctgcggcaaacttagcgatagctcccaccggagtagctttcgaagcctgaccaccggtattcgaatatacttcggtatccaaaacgaggatattcacatttttgcccgatgccaaaacatggtcgagaccaccgaagccgatatcgtacgaagcaccgtcaccaccgataatccactgtgattttttgataagatactgactcaatgaagctatctctttacatatttcacacttatcggcattggctttcacgataggtgtaatttgagcttcgagctcgatagaacgttcggtattgtctttatcggcaatccacgctgcgaacagttctttggtctctgccggacagctatcgccctcgatggctcgattcatcaatttcaccaaacgctcgcgcattttttcaacggccaacgtcatacccaaaccgaactcacagaaatcttcgaacaacgaattggcccaagcgacacccttacctttatcgttcgttgtgtaaggagtagaaggtatcgaacccgaatagatcgaagaacagcccgtagcgttagataccatttcccggtcgccgaaaagctgagaaatcaattttacatagggagtttcaccgcaacccgaacatgcccccgagaactcgaacaacggagtagcgaactgcgaatttttcacgttcgatttaatatctaccaagtgttgcttgctcttcacattctcggcacaataatcccaacggggagcctcgcccaactggctttccaaatcggacatagacagagccttaccgttcttattgcccggacaaacatctacgcaattgccacagcccaaacagtcgagaacatcgacctgcatacggaagtgcatacccttcatggcagcagggactttcatttcgagagtctcgccagccttgtaaggagaagcagccaattcggcttcatcgaggacgaacggacggatagaagcatgaggacaaacgtaagcacacttgttacattgtatacagttttcactgttccaaacagggacgaaagcagaaacaccacgtttttcatatttagcggttccggcaggccaagttccgtcttcgattccagagaatgcagaaacaggtaggtcatcgccggcttgtgcattgataaccttcacaacattttctacaaattcgggagctttgctttctgccttttcgtcatcgggtagatttgcccatgcagcatctaccgtcaccttctcatattcacctccacgatctacggcagcatagttcttgttaacgacatcttcgccttttttaccgtaggacttcacgatgaatttcttcatctgctcgatagccaaatccaagggaatcacctctgttatgcggaaaaacgccgattgaagtatcgtattcgtacgattgcccaaacctatttcctgagcaatcttcgtggcattgatcgtatagaacgaaatatttttctgtgccaatgtacgttttacgttattgggcaaatgcttaaccagctcttcggcggtccaaatcgtattcaacaggaacgtaccgttctgacgaattccgcgcaacacatcgtacatgtgcaaataggcttgaacatgacaagccacgaaattgggcgtattcaccaaatatgtagagcgaataggcgtatcgccgaaacgcaagtgagaacaggtgaaacctcccgactttttcgaatcgtaggagaaataggcctgacaatatttatcggtattgtcaccgataatctttacagagttcttgttagcacctaccgtaccatcggctcccaaaccataaaatttagcttcgaagataccttcgccgcccaatgccaattcttctttcggaggaagagacgtgaaagtgacatcatcgacaataccgatagtaaagtggttcttgggctcaggcaaagacaagttttcatataccgacaaaatctgtgtcggagtcgtatctttcgaagccaaaccataacgaccgccaacgataagcggcgcatcggctttaccataaaatacatctttaacatcgagatacaaaggttcgccattagcgcccggttctttggtacgatcgagcacagccacacgtttaaccgtcttaggcagggcagacaagaaatgttctgccgagaaaggacgatataaatgaacagcgaccaaacctactttctcgccttttgccatcaaatagtcgattgcctcacgagcagcttcggttaccgaccccatcgctataattacacgatcggcatcctcggctccataatagttgaacaaatgataatcacgaccagtaatcttattgatttcctgcatataatcttctacgatagcaggaacggcttcataaaatttattggaagcctcacgatgttgaaagaaggtatcgggattctcggccataccccgcataaccggagcctcgggattcaatgctcgtgcacggaactcggccaaagccttctgatcgataagcggagctaaatcctcattttcaagagcctctattttctgtatttcgtgcgatgtacggaatccatcgaagaaatttacaaaaggcactctcgaccgaatcgtagataaatgagctacaccggccaaatccattacctcttgcacagacccttcggccaacatggcaaatcccgtttgtcgagtcgacatcacatcttgatgatcgccgaagatggatagcgaatgagaagccaacgtacgtgccgatacatggaacacgcaaggcaacaattcaccggcaatcttatacatgttggggatcatcaacagaagtccctgagacgctgtataagtagtcgttaatgcaccagcctgcaaagaaccatgaactgctccggcagctccaccctcagattgcatttcttgtacgaggacggtttccccgaaaatattcttacgcccggcagcagcccactcatctacatactcagccatagtagatgacggagtgatgggatagatggctgcaacctcagaaaacatatacgagatatgcgctgcggcctgattaccatcgcaagttaaaaattttttctgtttactcatcttttcttgttattaagtaattaatattgttttttttcatctctaaatcaatacacaaacccaaacaaccataaaggtattaagttttcactacctattttcaaatcgtctaccgcataataaaaatgagggttgatacgactgcggggcacactcccttgtattctgaacaaaagttctcggttcaccaaaaactgagcgtttttactacccatattcaaacgatgatccttgtgcaacgtattataaaaaaaggtttcgcgaatcgattgaggatctgcctgaaccgaccgattggaatatataatattcgtattatgcatatacaccatagccggttttttagggaattcctcccctacccgataaagcatattaataagcctcgcatctttcaaacttttaatataattcataaccgtcgctcttgaaatttgaatatccttgcttaactgactcacgttagtgggagccggcgaatgaaccgacaacaaatacattaaacgacgaaccttcgggagataggacaattctatttgcttaatcaacagaatatccacctccataatcatattgatatttttaaccagattttccgagaaattcgatttatccaaaaagaacggataatatccatgatgcaaataccccggaaaataatctaatggatttacttgcgcacaaatttcctgagcgatagccctatgattagttataatatcgctaagtgaatatgaagggaaatgagtcgaagccatcaaattcaaatattcccgaaatgaaaaccctcgcagattataagaatcgaccaatccggccaataccggattctcctcttttaatcgcataaccgacgaaccggaaaaaattattttcaattcgggcaaatgatcataacaatatttcaattcctccgaccaacccggatacttaaatacctgatctatcagtaatacccgtcccccttgtccataaaaacgttctgcaaaatctctcagagtatgctctgtaaaatataaattattgagatttatatataagcacgaccggtctaagccgtaattttctttggcatattgcagcaaaaatgtggtttttcctacccctcggctaccctttatacctaccaaacggctgtttttgtcgatttgatacattaagtcccgtttcaccggagactctacatgctcgacgagatacttgtgtgttctataaaacgattccacggcttctctcttaaacaggctacaaagataataaaacaccactattttggcaagccgactttgcaatttataatatgatagtgtttattactttttattttaacattatttcaaagaagcatcttccccattcataagctcctataataaacaaacacaataatatttcattagaaatacctatataacacaagagagattaccgaacctcgataatctctcttaatctatttattcgtttagttatcacttcgcaggagaaatcgttgctgcacgatcgagaatataagaaccgaaacgatcgagtttcgcatcgctggtcttttgttccaactgatcggggctaacgccataagatactaaggcatcatagactctttcggcacgagctttgcgcaacttagcattgaaggctgccgtacctgtttcgctatcggcataaccggtaatcacatacttcgtatccttgttagctttaatagcctttgcaacagctttcaacactactctgtctttcccttgcagttccgaactatttatattataataaacggtaaccacaggagcttgttcctcaacgatcttttctgccggacgattcttacattcggccaattgttgttcgaggtctgctatttttcgattggcatcgcgcaattgagcgacaagagcatctccttccgcatcgctgtatttacccacaaccggagctacaacaggcacaaccggagcattccaaccacgacctttgaacttataggttacacccaccaaagcagaaagagtcttagcatgatttccttccccggcaacagtctcttcaaacacatcgaaacggagatccaaattgatagcccaagcatcgcttaaacggaaacggtttaacaaaccgcctctcatacccatattgacacaatcggcaatatccccatcaccggaaactgcaacaggaattcccataccgacatataaaataggagaataaacgcgctcgcgatatccacagaacaaacttgccaaatcgcccatcacatcaagagccggcgttattagagcatacgattgtttgtaataagtattgtcgagcatctcgccactcatgccattaccccataaagcagctcctttcattccataataatcagcgcccaaacgcaacccgataacaggagaaaaccatttctcgacattaagaccaaacacaggagcaatacgcttaccaaaatcggcatggctatcaaatctccctaaactaaaatcaaccccgccttcaagtgaaatcatccaattgtctttaaacttattcaagacaatttctttggaaggttctgtcttagcctcctcttgggaagctgctgcaaccattgccggcattgctgcaaaaacacctgtaagcaaaattgcagatacagtcttcttcatactactattatttttaattaatatatgtttaacattcgatcgaccagcatataaaagatatgaaaatcaatcattttatagacccaattgaatttggggataaagataattgatttattttattcgacaaacaaattttatttaaatttacaacaaagtcgttcttctataaaaaaagaaaaacgactttgcttaaatttctctaaatacttatttctctacaaattcaataatttcccgagcgatattatccgaggtaaatcccaatttttcatcaagaaccttatatggcgcagaataaccgaaatggtccaatccatacactttgccctcactgcccaccaacgggaacagagtcgaaggcaaaccggccgtcaacccaaacaccggcaacccgggaggtattaccgcgtttctatacgataaaggctgctccaaaaatagacctatcgaaggagccgagacgatctgtacccgtacccccttatcatgcaatatatttacggcgccgactaaggtagagacctccgatccattggccaccaacacaacatcgggagtctcgtctttcatcaatatataagcgcctttctctgcttgtaatgcatcgttataacgactgcccgaagccgacggtaaatcggggacatcttgacgggaaagaatcaatgccgtcggtgtatccttattctccatagccaatttccaagaaacaagagtttcggcgctatcggccggcctcagaaccaacacactatttttgccgctatgattcttcaactgctccatcaaccgtatttgagcttcctgctctaccggctcgtgagtaggtccatcttctcccaccctgaaagcatcgtgcgtccaaacatatttcacgggcaattccatcaaagccgccatacgaactgccggtttcatatagtcagagaaaacaaagaatgttccacaagcagcctgcattcctccatgcaacaatataccgttcataatcgccgccatagtcaattcagcgacccctgcatgtaaaaatgctccgtggaaatcatccttcgcaaaagctcctgtcttcttcaaaaaagcctctgtcttatccgaatttgccaaatcggccgaagaaacgaccatatttttcacccgttccgccaaatatgccaaaacgtttgccgaagcagtccgagtagcgacattcggtttatactctatcgatgagaagtcaagcgcaggaagttttccggcataaaaatcgtgcaactctctggccaattcgggattttctttctcccacgcagcttgcgccgatttacgttctgcgacaatcgctttcaattcctctgctcgacgggcatacagaccggaagtttcagggaatatcacaaacggattttccacatttccgcctaaattctcaatggtcttttcataagatgcacccgacttactcaaaggctgtccatgcgtagaatattttccctcgaatttctctcccgtaaccgttacacacccacgtcccataatggttttccctataattagagtcggacgttcagtttcacgattagccaacgccaatgcatcacgaatagctactggatcggttccgtctatttccacgacattccaattccacgatctatacttcgcagcagtatcttcatcggttaccgcatctgtatcagtcgaaagttgtacgtcgttactatcatagaacataatcaaattatgcaatcccaagaatccggccaaacgacctgcaccctgagaaatctcctcttgaataccgccatcggaaataaacgcataaattttatgaccacaccattcgccgaaacgagcagccataaaacgctcggcgatagcagcgccgacagccatcgtatgtccctgacccaaaggtcccgaagtattctcaataccatgcattacatcgacttcggggtggccgggagttatactaccccattgacgaaacgacttcaaatcgtccatcgtataaaaccccgacatagccaatacactataaagcatcggggacatgtgcccgggatctaaaaagaaacgatcacgatttatccatttcggatccgccggatcgtacactaaaaactcggaatataacacattgataaaatcagctccccccatagcacctccggggtgacccgatttggctttttcaaccatcgccgccgtcaatactctgatattgtcggccgatttgtttaataagttcgtatcgttcatgggaatttttttacaaaaataatacaattcatgagtatacaaacacaaaaaccgccaaaagttcacaaaaagacaaagagagtgaagaagcatcttcactctctttactaaatcttatctattaaataaatagttatgcctcataatcgtcggtcggaatatctgtattaacattcttactacctatggcagcatagaataaaatataagccaatcccaacgcaattacccaatagctattcaagaatccggcgaaatcggctacacctccttgaatcaaaggcaatataccgccaccgcaaaccataaccataaacagaccagaagctgctgctgtatatttgcccaacccttctactgcaaggttgaaaataccgccccacatcacagaagtacaaagtccgcaaagaatcaacaacatcacgtttacaggaacttgggcaaagccgaatgaaatatcggacttaaatacaggcatatttaccaatatattatctgcacagaatatcgcacccaataccaacacgatacccactgtcgatacaaccgtcaacatcgcgcgactggacaccttcgctccgatagaggccccgcacaaacgaccgatcatcatcaagaaccaatatgtccctacaaccgatccggcaatcgttggatcgatgtttatctcaggtgaagtcataaacaaattggcaaaattaggaatgccgacttcaacacctacatatataaagatagcaacagttcccaacacaaaatggcggaaagaaagtgcgctatgtttactcttctcctttttggcagaagtttttacgatatgaggttctggaatatttacaaaatataaaacgacaaatgccaaagcaaaaatacccattgccaagaacaaggcagggtcggcattggaaattttagcctgagccaaatcaccgatcaaataacctaccaacaccggtacaatagtcgcactaatcgagttgaacgaaccacctaattgaatcaattgatttcctttgtttccaccgccggcaagagtattcaacataggattcactaccgtattcaacatacacatggaaaaaccggaaatgaaagcgcccaccaaatacacggcgaaactttcggcgatacccgacaagaaagtgatacctacaccgataaacccgacggttacggcaagaagcgcggtcttcttataaccaatgcgctgcaacagcataccggccggaattcccataaaggcataagcgataaagttagccgcatttcccaactgcgacataaagttactggctccgaactgacttttaacaatgactcccatcggattctgaagccctgtcacaaacgaaatcatggcgaacaatgcaaacatcactataatgggaagtgcatagttctttttctgctctgtactcattttataagattttaattaatgaatttatgtgtgttttacttcttttacaatagatattttaccctttgcacatcaaaaaatacaaaattgagagcaaaagtaatgttaattatccatcaacagatacgatagcagcatgtttttgagcataaaaactttcaaaactcacattcagattgtcattcaaaaacatgaataaacacgttccccgaatatagacgttcctatacgcaccaacgtactgccatgtcgtaaagccaacggataatcatgtgacattcccatcgataattcacaaaatgccgaagaatcgaccgagctcgaacctttcacctcatcgaacaattttttcaaagcactgaattctcgctctatacaatcctcatcatctgtctgggtggccatacccatcaatccacatatccttacatgaggatatttctccgaggaaccgccttgtaacaattcccggcaagaatcaggcgtaaagccatatttactatcctcttgcgccacgtggatttcaagaaggcaatcgactactcgaccgcatttgaccgcctcgctttctataaccgaaaggagcttttcgctatccacgctatgaataagagtaatgaacgggacaatatatttcactttattggtttgcaaatgacctataaaatgccattctatatccttaggcaaaacctcatatttttcaacaagttcctgtactcggctctccccgaaaatacgctgtcccgcctcataagcctccattatggtttcggccgtatgaaatttcgagaccgccaccaaccgagttccagcaggtaactcttgacgaattcgctctatatgtcgggctatatcactcattcttgcggacgatcttcttcttttgtttttctttcgggatcaaacggataaacgtccatcaacggagtttctgtaatagaaacaatcacccagtcggccattgttcctttcatgccttccaccaagtttttcaatgccgtttcaaaatctgcggcttgcacaagcatatacgatgccgtacgcttttccataccgcttttctcgtcgagagtgataaaattgagtttacatttataccaccgatcacctgtttcatcgaaaaaaagctcgctgaaattagctcgcttcaccgccgaaacagaaaattcccccgagataaacggagatacctcctcaataatacgagcttccgcttcggtaaacgataaagcatccaccaaatagggctctgtcacttttttttgcatgccgttttccagcatcttatcgtacttaactctgcactcaaaccaattagccatatttttgcattcaaaaaagaaggtgctcctgcaccctcggttgttaatattctattttatcactcttgttttcccatttttcaaaagccttgatagcttcgccgcgcatcatcgggactacattcaaatggcgtttttccaaaggtaaagccaattcgtcgtaaataaacgagtcatcgaatcctatctccttggcatccgccttcgtatttccgtaatacactttgtcgagatgcgcccaataaatggctcccaaacacatgggacaaggctcgcaagaagtatagatctcgcatccgctcaaatcgaatgtccccaatacccgggctgcttcacgaatcgcatttacttctgcatgcgccgtaggatcgaccgatgccgtcacacgatttgccccccgcgctatgatttttccatctttcacaatcaccgcaccgaacggccccccgtcgtgatctatattatcgagagacaactttatagcctctctcataaatgattctttttcacacatacgtcaagaacaattcacattaatttataaagtcttcaatgagagcaaataaaaagggctgcacatctccgcttataactatgcctatttctcactttcactacaaaaagacgacatgaataaaacgaatttattcgattgcactgtatattgtctattttgcattacttgcaaagttacaaaacagattcaacgaaaaaaatatacttaaaaaagtatgtccctattttaagcttctttcaaacttttattcacgcgatcgatataatcgagcaactcttcacgcccccgttttttttccgacgatgtagcgaaaatgggaggcaattcttcccaagattcatgcagcacctgtttgtaatactcgatatgctctttcagtactatggggccaatcttatccgtttttgtaaatacaatggcaaaaggcacgctgttttcacccaaccattccatgaattcgaggtctatcttttgaggtttgtgccgacaatcgagcaggacaaaaagacaagtcatttccttgcgataaagcacatacccctctatcatttcccgcaatgcctctcgactctctttgtctcggcgggcatatccataacccggcaaatcgaccaagtaccaactatcatcgacaaaaaaatgattgataagcatcgtctttcccggagtagacgaggtcatcgccaaccctttcttacaagtcaacatatttatcaacgacgactttcccacattggaacgtccgataaaagcatattcgggtaatccgtgcgatgggcagtccttcacatggctgctgctaatcacaaaccgggcgttttttatttccatatattatattcaaattttgacaatccatgcaaaaatactcatttttcccgatttgacgacaacgctgttttttctctgtctcaaaatatgacatacagaacaataactaacagatatttcctatatttgtagatacgaatataggatgcggttcggcatagtcaagtcagaaataagatttcggtttgcctctgcactcaccttttactatatttgcaaactcgtgaaaaggaacaacccttatggaccaacaatattcttctattcttctcgaaaatgcggtaaacgaatttgccaaactaccgggtatcggtaggaaaacggctttacgtttggttctgcatttgttaagacaagaagagggcgaagccgaaaaattcggtaataccattatcaagttatgcaaagaaatcaaacgttgccacatttgccataacatatccgactcggatacctgtaccatttgtggcgacccttcgcgcgatgcctccacgttgtgcgttgtcgagaatgtgaaagaggtgatggtagtcgagaacactcgccaattccacgggctttatcacgtattggggggggtcatctccccgatggacggcataggtccggccgacctcgaaatcgaaagtttggtagaccgagtcgcctccggtggaataaaagaggtaatactcgcactcagcgccacgatggaaggcgacacgaccaatttctacatattcaggaagttggctccgttcgatgttaaaatcaccatcatcgccagaggagtatccataggcggagagctggaatacaccgacgaaatcacattggggcgttccattctcaaccgcacgttattcagcgaaagtttcaaaggataatattatactattttcattagactgccgttatacattataatattagagattctgtcttgtggtaaaaatcagtgtcgttattgtcaattaccgtgtaaaatactttttggagcaatcgcttcggtcggtacgggctgcattaaagacatacccgatggaagtcgagatctttgtcgtggacaaccactcgcaagatgactcgctcgattacctcataccccggtttcccgaagtccgattcatcgccaataccgaaaacgtaggattcgcacgagccaataaccaagccatcgaacaatccaccgggaaatatgttctgttacttaaccccgacactgtaatagccgaaaatacgttattcgaagttttccaatttatggaagctcaccccgaagccggaggaaccggggtaaaaatgctcgatggtgacggacggtttctaccggaatccaaaagaggattccccactccgtgggtatcgttctgcaagattttcgggctctcggcattattcccccattcccgcattttcggccgttatcacatgaaatacctctctcccgacgaatgccaccccatagacattctttcgggtgcattcatgttcatgagacgtgaaacactggacaaaagcgggctactcgacgaaagttttttcatgtacggcgaagacatcgatctctcctatcggctcgtccttgcaggatacaccaattacttcctgccgactcctattatacattacaaaggagagagcacgaaaaaaggaagcctgcgatacgtccgtgtcttttatgaagccatgctcatttttttcaaaaagcattacccgcattacagcaaagggtattacctcgccgtaaaattctctatattcttccgagcctcgttagccgctgcttaccgagccgtctcctttccgtttcataagcatggaaaaaccgataagaaagagaaaggaaaatggtatattctctcccgcaccccgcaaaccatagcccgattgattccgggtataaaacactacacgcctatatggtcagccgatgaaattccgtcgtcatctgaacgacaagacgaccggcatatcatattagattcgggactactttcctatcgggaaatcatagaaaccatacaatcaaaaagcgacgtccgtaaccatttcctcatctatactcccgactcagaaatcatcatttcaccccaacaaacctatacgaaaccatgaactacctcaccggcaaacaaatagaactgcgagcggtagaacccgaagacctcgatgccctttaccgctgggaaaatgattcgtctctgtggatatacggaagtaccgtatcgcccttctcacgttatctgttgaaacaatacatcgaaaactatacggccgacatcactcgggacaaacaattaaggctcataatcatgcgaaaagagagtcgccaagttatcggtgcgatagactgtttcgactacgataccacaaaccgtaaagcagcgataggtctcctcatcgatcccggtcacaaacgacaaggattcggacgagatgccctcgaaacattcgtagaatatgctttccgttttttacacctgcatcaattatatgtacatattcccgtttgtaacacagccagcatagcgcttttcaggacatgcggatttcacgaaagcacacgcttaaaagactggatacggttgcctcagggatatgccgatgctctgatatttcaaaaattcaatcgggaataagcgcctaattcatcagaggactctaattgagcgaaggttcctgcggggaatttagccacaacttatatccgtcccccataccctttactatctctctccaaaaagcatcaccttcggccgcaagacaatcgcccggcgaagacatagtcgtcacagcccacgactcctgttttaattccccgtcgagctgcccggccgaccaaccgctataccctatcaaaaacttcacatgtttttgcaccgtagagtcgcttctcaaaaaatcgagcagcatatcgaaatccccattagcgaacaagcccgtcgaaacctccactgcaccgggtaatgacgctatatcgtgcaagaaaaacaaatgatccgttcctaccggccctccacaaaaaaccggaatggaaggtatatcgttctctccctctaacaattcactcagaacatatctcgtcgggctattcaacacaaaccccaccgcacccttctccgaatattcggccaaacaaataaccgctcggcggaaacacccttcgtccaaaaatggctccgccaccaacaacgcgccccgatggggcggcatcacccgcctgcgtatatgaaacgattcgacgtgcatacagatacgattaaatctctgtcaaatataaaaattcaatcccgtagttcaaaacaaatcgtaaagtttcaccgacaaaaaacgctcttgcaatcatttcttttcgcatggtctcgaactgttacgacagtaaacaggctaagtagaaccgttataaattaaacgatgacacagagcaaacgatacgaaataaccccgaaacgccttacatttgtacagcaacactacaccattatggacggaaaagacgacatctcgaatgtaatccgggagaaaaaagccgcacgggtcacttgggtgggattttttaccaatctcatcttgtctgccgcaaaaatcatagccggcatatgggggcgaagtagtgccatgattgcagacggcatacactccttatccgattttatcacagatttcatcgttatcatcttcattaaaatctcatcgaaaaacgaagacagcgaccacccttacggacatggcaaattcgaaacctttgccaccatgctcatcagctttgcactcttcgtcgtcgccattggaatattttattcgggaagcatcaaaatatacgaagtcctcaacggggaaattatcgaacgtcccacctatttggcactcgctatggcagctgtttccatcatcgtaaaagaaagcttatattggtacacgatcacaatcgggcgcaacatcgacagtccggctgtcattgccaacggctggcatcaccgttccgacgctttctcctcgataggaaccctcataggcatatcgggagctatgtttctgggtgaacgctggcgggtgctcgatcccataacctcactcgtcgtaggaatatttatctttggagtcgcttataagctcgctcgccccagcatacaagaacttctcgaaatgtccctccccgaagaagtggaacaaaatattgccgagaaaatacagcagacacccggagtcatcgcattccaccacctgcgcacgcgtaaaaacggaaacacattcatcatcgacatgcacatcaaagtcgaccccgattcttctatcgtcaaagcgcacgacatcgccacacaagtggaagaatcgctcaaaaccactttcgggaaaaggacgcaggtcaatatccacatcgaaccgtatttgcaaaaaaattaagcgatacagatactattttatcatttttttctatttttgtatttgaacagtcgttaataaactgtttttgaaatcattcaatcgagtataaaccctaaaagaagaaaggagaaaacaaataaaaaaaacacgaacgaaacaacgggatttgtgtacgacagtatagaatcctcataaatgcaattaacccgatgtataaacacccggataagcgtttcccgttcggacacttaaaataaaatcgagctttcagctcttgttctctttacgttgaataccgccaaacattcattccacgagaacaagcagatcgaaagttcacgcttcaaaggcgtgagctgttctgtgcttgttgtggaatatggtcacttggcggtaaccaaacgtaaagcaagcgaagaatggttacacgccttttccatatttaaaccaatcgaaaaaaattataaaatactcatattcttaaaagaaataatcatgaaaaatttactgaccgttgtgatgctgtttgttttttcaacagcattatatgcacaaaaagacgtaaccaaatttctcgggattcccgtcgatggcactaaaactgcaatgatacaaaaacttaaagccaaaggattcacaccctccacatgggacaaaaatatcttggaaggcgagttcaatggatttgatgtcaatgtacacatcgtaacaaacaacaataaagtttggagaatcatgttggctgataaaatcactcaagatgaaacaggtataaaaatccgttttaacgaactttgccgacaattcgaaaataacaaaaaatataagtccatgaccgacaaggagcaaacaattcccgacgacgaagacctttcctatgaaatgactgtaaacaacaaacgctatgatgctggtttttaccaaatttccccattggacaccatagccatatacaatgaatcgaaacaatctctgctggacaaatatacgcaagaacagctggacaatccgacagaagaaatatcaactgcaatccaacttaattatctcaataataaactagatattgagctgcaaaacatatttgctatgactaataatttcgtttggtttatgatcaccgaacatgctggaaaatattacatcactatgttttatgacaatgaatacaatcatgccgatggagaagatttataattataaacccaataaaaacaagcggagctttttctcgaagctccgcttgctgtatttcatgctatctaccgtctctcgatacggccggcaaaaccgccaccggggaataaagtgaccttcaactgtcggtcttcgggaacaggcattactacccgtttataatcgcaagcggcacggtcggcatttataccgtccttgaacagctctatctcataaaagccctctcccaaaaatgagagatcgacaattatatcccgtttatcccagtttgtcaaacctcctacgtaccactcatcgcccgagcgcctcgccattgtaatatattcgcccactttcccgtcaagccccaaagtttcgtcccacacagtcgggatgcgggctatgaaagcggtacactccggttctctcttgtaattcgaaggattgtcgcacaacatattcaacggagaatcaaaaataacatacgtagccaactgacgacagcgtgtgccctgactcatcggctcactattcaccggattataattcttcttgattgcattgcgcatagctccctgcgtatagtccataggtccggcaaactgacgaataaaaggaatctgtacatcgtaagtcacttggtcatatcctttcgggctccatttcaattgttccaaaccattcacaccttcatagttgatcacattgggccatgtacgttgcgctcccgtaggtttgtacattccatgaaaatccaccaacatattataacgggcgcacaattccgaagcttcattgataaaccgcaccatctcttggtcgtccctatccataaaatctactttgaacccttttatccccatatcggcataatgcttcacgacattttccatatcccgatggaaagcccaatatccggcccaaagaatcaaaccgacatttttcccgtcggcatacgttaccaattcaggcaaatctatttcaggaacgacctgcattaaatcggcctttttattcacagcccacccctcgtcgagaatcacatattctatcccgttctccgcagcaaaatcgatataatatttatacgtctcgttattgattccggcacgaaaatctaccccgtagagattccacgcattccaccaatcccaagccaccttacccggttttatccacgaagtatcggcgatacgcagaggtttccccaaacggaacacgatatcactggcggccaactctgcatcattaccggcaacggcaatcacccgccacggaagttgggcattggcatcacgagcaatatattcttctcgggaagtaacaaacttttgtaacatgttatgtcccccttgaaccgtcgttttcggaaccggcgcaaagtgcgacgtaaggaccggagtatcgcctccacccaccaaatacatacccggataattatccaagtcggcttcggttatacacactttcattccatgaggcaactctaccaacacaggaagaaataaaaggcgcgacgatttaaatttggtaatagattcatgttcataagtattctcgaacgagttgatatactgcgactcgaaatcaccatcgtctccacgttttacataactagcgtacatcggataatcggcggaaaatgtaaaatcaacttgttcgttatatactgtataagggatattacttttataggtcaatcgatacgctattccatcgtcataagcccgcacaaccaacccctgttttcccgatgtcaaaaccatctgattataacgatccttcacttgaaaacgtttataaacaggagccggaatcatctcgtctacaaaactcctgcgaactttgggttgtttggaattcatgccccataaaacttttgttcgagattcgttgttttcttttatcgtgagggatataggagacggagccaaaacctctgtttctccagcaaacacgctcagagtcgtcccggaattcgttaccgatacgaccactcttaaatctcccgagggcgaagctacttcataatttttagcttgagccgcaaataccgtcatgaccgcaatgaaaagggaaatgctcttttggaaaatgttcataaggttaactttattttattattactctgtaaaatacaacgataagcgaaagcaaaaataacaaaatagtcacatatcgaaaagaaaagaaacttttatttctcattttttataaacaagacatgtattccccgcttcccgatacgaaatttgccgtcgaaacatttgaatacaattttgaattatggacgaacgcaatctcatcaacggctcgctcgtgtcgtatctctcttgggccgccgattttatctcacccatacgttggtttctattagctgcattcgcattggttttggccgacttgaaattcggtatcgaagcagcacggcataggggcgaaaccatacgcaaaagcagggcgatacgccgaagcgcaaacaaaatcatcgactatctttgctggatactggtcgccacgagttttggcgaagcgttcggcacaccgttcgggattcccatattaccggcactcgtgctgttagtggtgtatggctgtgaaatcaattcgtgtttcaacaattacttcgaagcccggggaagcaaactgcgaatcaatatcttcaaatggttaaaaaacaagtccgatattatggtcccctccgacgatgaaaacgataccacgaaaacataaactttacatcgggataacagtcgctcgataacaataatttacgccaaacatagccggattagctcaaagttttgtatttttgcgaaaatttacaaacatatacctatgaatattctcgacctaagcgaacaagagatcattcgtcgtaacagtctcgacgaaatgcgcaaattgggcatagaaccctaccctgctgccgaatatcctgtaaacgcctattctcaggaaataaaaaataatttcgtcgatggtgcggaaactcctcgtcaggtagccatagccggacgtattatgagtcggcgtatcatgggtaaagcctcattcatcgagttgaaagactcggagggccgtatccaagtttatatttcgcgtgacgacctctgcccgggagaagataaagaattatacaataccgtattcaaaaagctgctcgacatcggcgatttcatcggtattcgcggatttgtattccgcacccaaatgggagagataacggtccacgcacaagagctgacagtactcgccaaatcgatacgcccccttcccatcgtaaagatgaaagacggggtagcctacgacgctttcgaagaccccgagctccgttatcgtcaacgctatgtagacttggtggtaaacgaaggagtaaaagatatattcatcaaacggaacaaagtgtacacctccatgcgggaatatttcaactctcgtggatatctggaagtcgaaacacccattctgcaatcgatacccggaggtgcggccgcccgtccgttcatcacccaccacaatgcactcgacatacctctatatttgcgtatcgccgatgaattatatttgaaacggctgattgtcggaggcttcgaaggagtgtacgaattttccaaaaacttccgcaacgaaggcatggacagaacgcacaatccggaatttacctgtatggaaatctatgtctcctacaaggactacaactggatgatggatttcaccgaaaaaatgttagaaaaaatctgtctcgacgtaaacggtactaccgaagtcaaagtcggtgaaaacacgatcaatttcaaaactccgttcaagcgtatcactatgctcgacgccatcaaggaacacacgggtatcgacatcagcggcatggacgaagcacaattgcgcgaagtttgcaaaaaaatcggggtcgaggtcgacgaaacaatgggcaaaggaaaaatcatcgacgaaatattcggcgagaaatgcgaaggccattacacacagcccacctttatcaccgattatcccatcgagatgtcgccgcttaccaaacgtcatcggaataaccccgaactgaccgaacgtttcgagctaatggtaaacgggaaagaactctgtaatgcctactccgagttgaacgaccccatcgaccaacggttgcgtttcgaagaacaactccgcctctccgaaaaaggagacgacgaagccatgttcatcgacaatgactttatccgggctctcgaatacggtatgcctcccacatcgggtatgggaataggtatggaccggctcgtcatgctcatgaccggacaaaccaccatacaagaagttctcctcttcccgcaaatgcgccccgagaaagttcaaaaacgagataacgaagcggcctataccaccataaacattcctgccgaatgggtcgcacccattcaaaaagcaggatacctcaccgtagccgacgtagcagaagccaatccgaacaaaatgcatcaagaaatctgtggcattaacaaaaaatacaagctcgaactggctaaccccacgatcgacgatgtaaaagaatgggtagaaaacgcaaaacgataatcgaccatgcctatacccggtaaaatagcgatcatgggaggtggcagttgggcgacagctttggcaaagctggcgcttaataatgccgataatatcctatggtacatgcgtcgagacgaccgtatcgccgatttcaaacaaacaggtcacaatcctgtatatctgtccgatgtcacattcgacacatctcgaatacatttcagctccgacatcaacgaaatcgccgatgcggccgacacgttactcttggtgactccatcgccctacatgaagtcccatttaaagaaactgtcggccgacatcagtaaaaaatttgtcgtgacagcgataaaaggaatcgttcccgacgaaaatatgattgtcaccgaatacctacaaaatttctatcacgtgccggaatcccacttggccgtaatcggggggccatgccatgccgaggaagtagcgctcgaacggctctcctatctcaccatcgggtgtaacgatctgcaaaaagcgagaagtttcgccgacatattggcgagccccaagctgaaaaccattatctcctccgatgtaaaaggcattgaatattctgccgtattaaaaaacgtctatgccatagccgccgggatttgtcatggtatgaagagcggagataattttcaagctatgctcgtatccaacgccttgaacgaaatggatcgttttttacaagcagtctccccatgtcgggacagaaacatcagcgattcggtatatttgggagaccttttggttaccgcctattcccggttcagccgcaatcacaatttcggatccatgataggacgtggctactccgtcagtgccgcaaaaatggaaatggagatgattgccgaaggatatttcggtacgaagtgtatttacgaaataaacgaacgatacaaggtgaacatgcccatactgcaatgtgtttatgatatactctacaaaaaagtattgccccggcacgccattgaaagtatatatgatacatttctgtaatacaactaatatagtgaaactatgaaatcaatcgaattgaacattgaaaaagcattaggcactgtatccaaaagcgatgtattcgcattggaagacaaagcgaaaagcggcatggaaatgctgcacaaaggtacgggtaaaggaaatgactttttagggtggctgcatctaccctccgaaataacagaagcccatttagcagacctcgaaactgctgcaaaacaattgaaagaccgttgcgaaatagtagtagtcattggtatcggaggtagctacctcggggccaaagctgttatcgaggctctatccgactcattcgaatttcttcgctcggaacataaaaatccgctcgtactgtttgccggacacaacatcggcgaagactatttgtttgaactgcaaaccctcctgaaaaataaatcttttggcatcgtcgtcatttcaaaatcgggaacgacgacagaacccgccattgctttccgattgttgaaagaacagctcgaagcacaagtaggaaaagacgaagccaaacatcgtatcatcgccataaccgatgcaaaaaaaggtgcattgcgtaaactggccgacaccgaaggatacaaaacttttgtcattgccgacaacgtaggaggccgtttctcggtactcactcccgtaggactattgcctattgccatagccggattcgacatcagaacgctggtttccggagcggtagctatggaaaaagcgtgtggagaagatattcctttcgagaaaaaccccgcagctatttatgctgccacccgaaatgctttatatcaaagcgggaagaaaatagaaatcctcgtcaacttcaatcctaaattacacttcttcgcagaatggtggaaacaactctacggagaaagcgaaggaaaagaaaacctcggaatctatccggcatcagtcgacttcacgaccgatttacattcgatgggacaatggattcaggaaggtgaaagaaccatcttcgaaaccgttctttcggttaccaaaatgaaacatacggtaaatatcccttccgacaaggataatctggacgggctaaatttcctgtcaggaaagagagtggacgaagtaaacaaaatggccgaacttgggactcaaatagctcacgtagacggcggagtccccaaccttaaaatagaaatacccgaattatcggaactctatttgggacaactgatttacttcttcgaaaaagcctgcggcattagcggttatattttgggtgtaaacccgtttaaccaaccgggagtcgaagcatacaaacgcaatatgttcgctttgctcaataaacccggttacgaagaagaaagtaaagccatacaagctcgtatctaattaaacataacgtaaatgtaggaacagcctgccgaaaaattcggcaggctgttcttttaaaatatcttatcaaataaatttttctatatatttttaatatctttactccctataaaacataacccttagatcatgagaagattagctactcttattttatcgttatggggaattgcactctcccatgccgctcttgaagtccccaaagctctacccgcaaccgatattactgaaaattcctttaccgcaaactggcaatctgtatctcaggcttcggcttacaatttgaatgtttttgcctataaaatggaagattgcgggacagaagcagtaaaagtcacagaaagttttgagggattagtgcctcgttcttctgggtcaaaacaaaataaatacatagactctaacctatccgtattccccgaaaattggaaaatcgacgtgaataccggctctattcgccaattatatacgaccaatgtcgccggagataccacatctgtttattcgggaaaaatagctcttgcattcgatgccacaggcgattcgattgttacccctgtattaccggcccccgcctcgaaattttcgttttggataaaaaacgccaatgccaccggaacagtcgcagtttacggatttgacggctttcaatggcactctcttggtgaagcctcaacaatcagttatcgaagtgggggaatagccgatttttccgccaatatcccggtggggtgtattcagttcaaaatgatttataccgatgaaaatccagatctaaacagtcccacggctattgacgaaataagttatacttatggcggtatcgtaaaaacacgggattatcttgtcgaaaacaaacgaatcacagaaacgtcagctcccgtaaccggactcaaagacaataccgattatttttacacggtaaaaagcaccaacgactctgaaacttctttggaatcaaatatgattgatgtattcggatatgcaggttccctttccaaacccgtactcaaagaattcaccgatattcaaggggggcaatatacagccaactggaacacagtcatcgggtccaacggatatgtcgtttacaatgtttatacccacattgcccaaagagatgaaacaaaaaccattctccacgaaaatttcgatgcttttacgggaggcacgatcgatcttccagcagaagacgacggtacaacgaattacgacgaatatacaactgtccctgactggtctgttaatttcgggtgctggacggaaggcatgctcagtggtatcaatattcagacccccgtcatcagcacaaccaatacaaatggttgtacaatcaacgtacgagtatatggagccaaaggagacaaaattgactttaacaactactactcacaaggtactcccgagaaaataaccaaatttctcacacaagaaggctataataatttgacaatagactttaagcatagcagtgaacaaatgtatatcgaattatatttcaggcaactcgatcctatcaaagaaatctatctcgacgaattcacaatgactcaaactctttcaaagggagaccggtttagctataattacgattataccctcgtcgaaggccgcaggacgaacagttatacttttacagatctacccaaagcatggggtgaccaatttgcatttcgcatgagcgcctatgcagtagtgggcgacaatctttaccaatctcaatggacagaactgacagaagttcccattccctcgaatatagacaatacccatcgagaaaaccaagagatcaaggttatttcctatcccggtaacacaattatacgacttcttgtaccccaagaaattatcatcagcgacctacaaggtcgaatcgtagcccaagttcaaggtgttgagggagataactccatctcattgaagcaagggatttatttgttgcgatgtggtaaccattgtcaaaaatttatctgtcgataacgaagaaacgagcaaaacgaaaatcggattcaacatttagtcgatataattaaaacgttcacatttaaaataaaacgagattacctccaaaagataatctcgttttatttttatttcaacagcccgattactttaaaatcccgatagcggaacacaggctcgtgtcgattaactattataacaaattccaatctaagtccagattcaatcaacaaaaactttgaactcggcaacttgcgtaccatcttcacggtgaaggactacgatataataaccacgagagaggctaatgtccgtaccacctataaaaacatcttccgagacgagacacccatcaagggcaaatacacgaacctgcaactgtaaattgtttttacttcgcaagaaaagcgtattatccgaactataatagatcaactcgccagatgttttaatcgattcaacgccactgccttccgtttcttcattatccaccctcaatttcattcggttaaggtcgagcgtcagaatacaatgatttgtcttgggaagcacaaacttatagtcatttccctcctcaaacgaattatactcataaataacatcatgttcctcgccaaaacgaataggttcatcttttgtcctagccacataacaacgttcccaagttcctcttctacgaaggaatttgaaatcgccggcctctacatctccttcccaacgatatacaccctctgcgatcggggtcatcaccataggatgggcattatcccaaccacaaggcatagccgctccaacagcaaaaaccgaaagaggaaatggattctctaccaaatccggttcaaacttttcgacggtaagtgtaagattgagtaaatcgactttcaattcataatatccatctccacttcggtcagccggaatagtccacttattatcctctccattcaaacgcattttcaaaggttgtcccacctttcccgaaatagaaaaatctccactcgatgcagggtgatatttatcgtcccagctcaatcgtttcaaaaacatgaaactaccgcactcgtcaccctcatcgttatagcgcatgacacccttataatagaaaatataaggatatgtccgatccacttctaaggctttggcatcctgaaacttccaaaattgaatctctcgattaaacgggcctcctatgatatacaagtttttaggcaattcgagccgttcagccttcaaactttttgcattaccatcgactgtaagggtcaatctatatacatcggtctcgctcgcataccggatacacaaccctcgctcgtcttcaccggcctctcgcaaaggtatagaatcgcccaaaggattattactaccacattcatggacatactccgttataccatcggtcaatttaaacaaaacttccggcaagccacccacgtaaacaaactcctttccatcgtctcccaccggagaaagcacgacgggaatctttaattcagccgtatctccaacaagccgccaatctgctctcgcagttagaacaaatccaaacaagagaagtaaaacggccatattcttgcaaaatcttttcatatttttctctttttattattcaatgattacggttatagctgaactgcatgctcttttcggtacggaaatcacgatctttttactctcggcatcatactcatagacagcatgcgttccatcggaaaaagtgacctttgtcggagcctcgttccgagccaaaaattcaagacgataagcccgttcttccggcatatcgtcgaatgatccggtacgaggataaatagtacaagaggttcttccgtcctcggtattttgcgtaattcttgtaaatgtacaagctgtttgataatcagcgttgtttccggcatcctcataataattaaattcgcctctggctccgggtgtaaactgcaaagtgagtgtttcaggccgttttttcaggtgcatcatacgaggataaagcggaatgatagcaccctcgcgataataataaggaatctgttcacgagtgaacgaacgagtaacgaccgaaccaccgtcgattaactcacccgtcatcacttcataccacttgccctcaggtagccaaatatctttttcactgacattcgttcctttatccgacgaagtgacgggggctacgagtatatcgtttccaaacatatactgtccctcataacggtaagcctcatctgcttcgggataatcataatacataggacgacacatgcccactcccgtatcgtacgaccaacgtgccatcgtataaatataaggtatcaaagcataacgcaaataaatggcatcacgcatctgctcaaaattagcatatttccaaatgcgacgttcgatatggccggcagccgtagcatgtgtacgcaatataggagagaagaccccgtattgaatccaccgcaaatacaactcggcatcgttggctccctcctgattatgacctcctatatcatgactccaataaccataaccgacattagatgcggtagctgtaaaatagggctgaaaagccaacgaagaaaaagtcgcttccgagtctcccgaaaaaccgataggataacgatgattacccaacccaccccaacgatgaaagataaacggccgattttttgcctgcaattttttatcgttgaaaaacacatgattcaaccaaaaagtattacctaaattcggttcattctgcgcaatcatccactgttgccaatcgacccaccaaaaatcgacaccgatattttcatgaggccgtaaaatatgttcgaaaaaggcctcgtagaaatccttgttttcgatattccaacgaatggtaccgtcttcgttagtcagactatcggcctttatatcagaataacgtccggccaaatcggcatacaaagcatcataattatcctctttggggaaaacaccatcggccggatgcaaattaagtgtcgtattcaaattttgttcatcgtgcaaccaagagataaaaccggcaggatcggggaaaagagctttattccaactccaaccggtccactcggttccatcggtagaaccggtcttgccattacgatgccaatccatatctataacgagtacatccataggaatatcacgcgaacgtatttcatttacaatatcgcgcatatcttgctcggtataacgttgaaacttagagtaccaatatccaaatacataaagcggaggcaacggaatcttaccggctatcttggtgaaatcgccaagagcctttttataatcatgcccataacccatgaaatacatatcaagagcggcggtatccttacgttgagcgacccaatccatacccccattcgtatctctctcgaacataagactcagactaccgtctttgcgaggttctcgttcatcgatcacagcccaaccaacacgagaaagtaacccattctccaaccattcacgcacatcgccctctgctctatccaaagttctagtcgttcctttcagattatacgggtcttgtttcccaggataccacacctcttcgaccccgttcacatcgagtgtaatttgtaaattaggattacaacgatcattacttaccggatatgtacccagtttataacgcagttccagtttatcggttgtaagataaagatatccgtcacgttcctcttgggtaaaattcggaaccggaagatggcgattaatgactacaaaggacgcgcgatcctcaaactgcaatttcgcactatattctatacgaatcatttcgggagtcaacaccgtaaagcgcatgttacccgacttcacaatagccttttcatcggccatcgaattatcctgcgccccgacagtacacgcaatgaaaagtcccaaaatacttaggagtacatgttttttaatcataaatacataaatttttaatagaaagattaaagtcgttctaccattatgacacaaaaaatacacataccccctacatacctgaaaaatttttgcttttacatgttttgttatacaatatcgataatattttgaatcgaataaaaaaggaaagggctacaaaatgtagccctttccttttttattttttaaccattctatttattattccgcttcatactctatggcgtcgctttctgtatcatcgtcttccaacgcctgagcatccgttaagattgttttcacaaaggttggtttctcattaaacaaaacgatagcagattgattcccgtccggagtaataaactctacctgagcggcaactcccaaaacctcagtcgtatcacgaccgacatagcgagcgattaaatcatacgattgtatataatcgtctacattcgtggcgacaaattgatcataagccgatttggcggcctcatactctcgaatatacgaaaagtccctatccttgtcaaatttcacataggcttcatgatctttgggcaaacgctccatagcctgtttatatccttctattttcgaagcataattacggtcattcccatgtgaacgcatagcctctttcaattttcgttcataatcgacacgacgagcaaactggctgttctcatcgagtttataattatgttctgctacctccatctcatatttcaaacgttgttcggtagaaacgtagctatcgatagcctcttgacgaccggctcgaagactatcggcaacggtcacttcatggagaatttctacttgaatcgaatcgactttctctgcggataagttttcatcggccgatagaacccacgttccagacttcaactccgatttcacatattctttaaatgcaccgacataatccccatcggctactccacccccacaggcacataaaacagcacccattgcacacaccggaatccacttacataatagtctcttcatatccctataactttatttcatttcaaaaaacagaaaaaataaaaacaaatcttgataatatcgaaatacaatccatttccatatttgcaacaaaaatagtacaagcccaacgcagaaacaagttcgattagtaatgccgaaactcgacctattctcgtatctattgcaaaaataatggattatcacagaatacaaacatttatgccttaattttacatcttgttaaatttttaacaaaccagaaataaacccaatatccaatctcaaacaaaataaaagtctttcaacaccacttctttggctaattatctcaaaagccctacttttgtagaataaaacaagaaacacgacattttggaaaatatcgctattaaaaactatcttttacagcacaacgtgccttgcattactcctaaggccgcgcttatcgatatggacggagttctctacgactcgatgaaaaatcatgtcgaagcttggtatcgtacactcacccctatgggattcaaatgttccaaagatgaattttatctatacgaaggacgaacaggagccagtacaattaaatacttgttcgacaaacatttcgggaaacaggtgtccgatgacgagtgtgccgagatttataaaatcaaggaaaaacatttcaacgcgttggaaaaaatcgtccccatgccgggagccgacctcatgctgcaacgaatcatcggtaacggcatacgccctgtactggtcacaggttcgggacaaggttctctcttagatcggctagaccacgattatcccggtgtattcgaacagcaatataaggtgacggcatacgacgtaaagattgggaagccgagtcccgagccctatttaatgggactttccaaagccggagtcaaagcgaacgaagcgattgtcatcgaaaatgcacccctaggggtagtctccggtacggcagcacaaatatttaccatagcagtcaacacaggccccattccggcacagacgctcatcgaagccggagccgatatggttttcccgtccatgcccgatttcgccaatcatgtcgacgaacttatacacacgctaaaaatcacccgttaatatcatctgtatggagtcgcaaaaaatcatattcaccgccacacccggcgaaacccttaaaaatatgctcgaaaacttttctttcgataccctttttatactctgcgacacacatacccaaaaattcgccctacccgaaatatcgaaaaacatatccacacaagcccaatatattacgatcgaagccggcgacacccataaaacactccaaacactcgttcacgtatggaacgaactgagccacaagggagccagcagaaaatcgcttcttatcaacttgggaggaggtatggtcaccgacttgggaggtttcgccgcagcctgtttcaaaagaggaatccgtttcatcaatatccccacaaccctattaggagcagtagatgccgccgtaggaggaaaaacaggaataaatttcaacggattgaaaaatgaaataggagcctttcgcccggccgatacggtcatcgtctctacacaattctttcagacactgccacagaacgaattattgtcgggatacgccgaaatgctgaaacacggacttatcgacaatccggccacctaccgttcattgctcgatttcgacttgtccatgcccgattgggaaaaacttctgccactgctcaaagaatcgatacaagtcaaagaacgtatcgtcgccgaagatccctttgaaaaaggaatacgcaaagccttgaatttaggtcatactatcggccatgcattcgagagcctttcacacaagcgggaaacacccatacctcacggattcgccgtggcttggggactcatatgcgaattactactctcccaccgttatctgaaatttccgtccgaaacaatctccgaattggcagcatacatctatcgccattacagagcatttcccattacctgtaaggactacgaaacactctacgagttgatgacccacgacaaaaaaaacgaagccggatacatcaacttcacattattacaaaccatcggcaaaccggtcatcgactgtcacgtcgataaggaagaaatattcgtagcattcgacctataccgcgacctatttaaattataacccctaccgactctcttgcaagcaattaggaaatttcgaagaaaaacaggagtaaaaaagttgttcaaaattttgtcagtatagaaaataccactacttttgcactaccaattcagcggggtgtagctcagcccggtttagagtacgcgtctggggggcgtgtggtcgcaagttcgaatcttgtcaccccgactgattttaacctaacttattgtaattcaataagttaggtttggtcgtttaaatacgaccgggagaaatacgggagatgtttaattcaaggggagatttgaaaaataatctcttcttaaaaaaaatgtctgttcaaaaaaattttctgacttcggaggtaatttcttatacgcctccaaaactttataccgggaaaaaaggtaatgactggtatatcggattcaaagcgttcgatcctttggccggagcgctacggctaaaaagaatcaagttaaatcacatcgaaaagatttcagagcggcgcaagtatgccgccgacctgattacccgtctacataaccagctccgaatcggttggaatccgtggataagccaaaacggaaatagtaaaggtttatccttgttttccgacgtttgcaatagataccggagctacatcgacaggcttttttccgacgggatcattcggcaagatacctatataggttatgtttcgtatttacgaaactttctcaaatacaatgattcgcaaaagcctccgatcacttacatttatcaactttcaaaatcttatatctccgagttcctcgaccacatctatatagaacgtgaaaacagcccgcaaactcggaataattatctgacatggttacgagtattttcggggtggctgttaaaacatggatatacagaacacaagctaaccgacggtatcgataatatttccaaacggagtatcaaaaaagaacggaaacttatagaagaaaacgatcttatccgcctactcgactatttgaatacccataaccggcattatctgttaggttgctatcttttattttattgtttcgtccggccgaaagaaataagtttgataaagataaatgacttctcggttaagtgcggaaccctccgcctacatgccgataattccaaaaacaggaaagatgccgttatcacgttgccgaataaggtgcttaaactattagtcgacctaaatgtgttttcttttccgggcaattattatctattctcaaacggttttatccccggtaaagatttccgagatagtaaacagttccgggactattggattcgctttgtccgaaaagctctcgatttcccggcatcatacaaattctactccttgaaagataccggggtgacatcgatgttacgggcgcgaatcgataacatatcggtccgtgatcaagcccggcattcctctattctcatcacggatatatatacgccgcacgacatcgagcaggccaatcccattattcagaagttcgacactgttttttaattatttatgtacatttgcaaaaactattcagatatggaacaaaagagtgaaatcgtattataccaaccggaaggggctataagtctggaagtccgtttagaaaatgagaccgtatggctgacacaacaacagatatccgaactgttcggaacagggaggcaagcgataaccaaacatctaaaaaatatctttgccagtaatgagttagacgaaaattcagtatgttccattttggaactaactgccgcagatggaaaaaactataaaacaaaagtctataacttagacgctattctatcggtaggctatcgggtaaactcaaaaaacgctacacttttcagacgttgggcaaattctgttctaaaagattatatgttgaaaggttattccttaaaccatcggtttgaaagattggaagacaaaatcgatacccgtttccaaagatatgactccgaaatacaaaggctcagcaaccaagtagattttttcgtccgccattccttaccgccgatagagggaatattttttgccggccagatattcgacgcctacaaattcgtttgcgatcttgtcaagtcagcccgaaaaagtatcgtccttttcgacaactatatagatgaatctgtcttgactttattcgggaaacgagaaaaatcggtgtcggtggtgatctatacggataagatcactccgcaattagagctcgacatcaagcgattcaacgcccaatattcgcctgtaaaggtcaagttatacacaaaggctcacgatcggttcctaatcatcgatggggaaatctaccatataggcgcttcgctgaaagacttgggaaagaaacttttcgccttctcgaaaatatcggctattccgcccgaaatcatatataaacaaatcgactcgtgaacgttatgcgacctcgtaccgataaaatagaaatctccggtaatctgcttacaggggtattccacatctacatcttcaaacaagataatgcctatatcgcctattgtccttccatcgatttagccgtctccgggaacagcatacaaaatgcggaagagtccttacaagaatccatgtcgatacatctcgattatcagataaagaataaagtactcttgaaggacttgaaaaagcacaaatggaaagtccgatatcttattaaaaacaagaaaagccggtgattgaccggctttttcatttttatacttcggtagttacgttaaatacattcttgttacccgaccgactttaatccaatcaaagttagaaattcaatacaacaagggaaatttatcaccaacaaaaaataattgctaataattatttcgattattcccgataattagtattataataacaaagccaaacaaacatctaattatcaatattttacaagaaccacaaatcttatttccatttatttttcattgcaattttaaatatattatattttagaatcattttttatatacttaaataatgaatataaaataaaaatatctacatttgaaaacctgaaataaacacaaagactcaaaatatactcgaattatccttaataatccattatttacccatataattttaatcattatgagaaaaacatttctaggagtactcgtttttatgagtcaattgatttttgcccaaggaatcgaggtaatcagtaccaaagcccttacactcgacgggcaaggagtatttctcccgaagataagtccgaagggggattgcgttctagtaaccaacgaagacatgagcggtctgaaaaaatttgatcttgcaaccgggaaattgacgaccattaccaatgaccgaagtgctgggtttaatgcccaattttccgaagacggctctaccgtaatttatagaaagagcgaatataaagggaaacttcgctactcatcattaaacagtgtaaatctacaaaccgggaaaacagaacaactagtaaaacctacccgaaatctagaaggtgtgactgtaaaaggaggtacggttctcgctgtaaataatggcaaacttatttctaaacggattgccggtaaaaagctgaaaaacctcccggctatcccaagtattaagaacagccagctttacattacaatcgatggaaaaacaaagcaactctctcccaacggaacgaatgtaggatatttatggccatcggtttctcccgatgggggaaaacttctctattatgtcattgacgaagcgaaagcatacgtctgcaatatagatggaacaaatccggtttctttggggacattgcgtgcaccggtctggttaggtaacgattgggttgtaggcatggtagattatgataacggggaaatcgttacttactcccaaatattcgccgttacgtcacaaggcactcatcgcacggcattgacagatcaatcaaaaatctgcatgtacccttctgcatccgacgatgcttccaaaatcgtctatacgacacaaaatggagagatatttttaatgaatgtagcaacctcaaaataattaatcaccatgaaactcaacaaacttctatcgatatgcttaggaataacgttagcattttcggtaagtgcaaacgatctaagcgaggccagaatatatattaatccggggcacggcggttgggggcctaacgaccggccgatggcaacgatcaattatgctcaaatggataccctcggattcttcgaaacaaatacgaacttgataaagggaatggccctaagggaagagctcgtaaaagccggagccggatatgtgagaatgtcgcgcacggtaaacggtgttgtatcggccgatgatgaacacaaaaccgaaaacgacaaatacatcgagactcagcccggagaaagtggaactcaacagttagttaccctatcggtgatttgtcaagatgtagaggccaacaatatggattatttcatttcgatccatagtaatgctgcaactgaggggagcagtacgaattatccactgattctctatcgagggaccgattcggaatcgggaaacggattgacaaacgcccgcgatatggctcgtgccgcatggccatatgtcaacaagaacgaagttacctataaatcctattataccggcgaaaacgacaacaacagccggggcgacatatctttctatggtagctcgtcctcaaacagcatgggatataccggttatctcggtgttttgaaacacgggtgtgacggcttcctttgtgaaggctgtttccacacctatcaacccgaacgacaaaggcttctcaacaaagactactgcaaacaagaaggtatgcgatatgctagggccatacgtgcatggttcaacgacgatagcgaaactaccggctgcattatgggaactgttaaagataaatataacactctcgaacacgacctctataaatacaaaatcaattcgatcgatgcctatgctcccttgaacaacgtaactgttattcttcaaaacgagaacggtgaagaagtaggccgatatacaaccgataaagaatataatggattattcgtatttaccgatttgactcccggaaactacaatctggtattcgacatcgagggattctggaaagaaaccgaaccaatcgaagtcatcgtcaatgaaactgcattcattaataaaaggctgaccgatttggaacacgaagaaccctctgatgaagaaatagaagaggaagtgcttgattatccacaccccgaccaagacggagatattgcagcagcggcatattacaatctcaccaaagaaacagaaattaccgacatcgaagccttgaatggacttaccgtacgtcgggcaatactgcgagacaacaaatattatgtattggcagtagatgaaaataaacttcctaaactcttggttctaaatccagcaaccggagaactcattaaagaaatgagtaccgaaggtcttgtaaccgaaggttataacgggaaagaattaccctatatactatccgatatcgcctttactatcgatggcgtgcttattgggacaaactcgacggtcatcggcaaagaaggcaatgcgtatcaaaccggagacttttacgtatataaatggcagggaagtgaaacgacctcgttagaagattcagccccggttgtcgtcgctacattacaaacgaatacaagtgccagcctcgcagccgccggaaataacaactccaactatatagccaacaccatcgctgtaagcggcacgatcgacgatttccaactgtatttcgactcccatgccggaaacgcttggaatacggcatacggtatcagatatgtatgttggaacattaaaaacggagaagtggccggattccagaaaaacgatacggacttcgacgaaagtcaaatcggagaaaaagcccatatcacactctcgcccttagcaaaaagtagattgatcatagacggtacactcacggccccaagagaatttttaatggactggatgagcgatcagggaatcatgctagccgatttctcggataacattccggtagagtcatacggagcgaattatttccgttacgccgataaaatttatatgagcgcacccatttgtgaaagtcaaggagatggaaattattcttataaagttcgtttatatgacattacgaatggaatagatcaagcccaaaacatcggagataccgaatctttcatctccactacgggactttctccaatgacaagtgtaggaatcgtagataattccgatatagatatatacctgttggctggaaacaaaatcgtaaaatacacgaccaaaggcatggagcaatccgaatctcccgcccgtatatttgcatacggtttatcctataacgaaacagaagacggatatactatcaacttcaacttaaacgaggatgccacatctgtaaacttgatattgaataatccagaaacaggcgaagctgttcaaacgattgcattaggagcgctaccaaaaggagcgaatcagactactatatccagagccgatcttcctgccgaaaagctgaattggagtattcaagccatcgccggaaacgtcacgaaatttacgaaaatatccgacgacagtcctctataccagtactatgcgccatacggtgtcgccatcgataaatcacctgaaagcgactacttcggacgtatctatataacgaacactgctgccggaacagtaagtgcaggaaatccttcacaagcccaaacctcgacagtgggtgtgtatgtactcggtgcagacataagcgatattactcaacaaggctccacagcttatagcggaaccatatcttggagcggagaaaccggtatgggtccgaaaaaagcagccgtagcatcagatggacgagtattcctatgcgacgccagcccgaacaacgcaggtatttacctgatgaaccccgaaacctttgatatttcttctatatttacaggagctacaaattcgaatggcagcctaatgataggaggcaaatatgtatgcggccaaataacagccgtaggtattcgaggagaaggtgctacaactcaactttatgccatagataaaacggcttcgggttcatcttggaaaaaatttatcaacgtctataacatcggcgaatcgaatacatggacaactgcgcccaacgaatcgaaagccgccagtagttacgtgggcaacgacaacagcagtatcgttcccgtttctaccggatattgggccgcacaatacagaggtggcggaagcaactctcccgcaaatccatgtatgttctattacagcgatcaataccaagatgccgtatttaatacagccgagcccaacatcatcggtgagtcgacccaaaacggagctctcgccgtcaatgacaaagaacagcttatagcccttagcgtaaatggcggagtggccgtgtactcttacaagatgaaagagggaataccttctgtcacggaaaaattccgaaaagaaattgccgaaatgggcggttatgttaatgatttcgaattcgactatgccgggaacttatatgcggtatccaatgccggtgagagattagccgtatgggctatgcctaccagtgacaacagttgtgtgacacccgcaaagaaatcattggtattgaacaatatatatacaggcatagaaaacaccgtaagcatttcacgtatatcgcccaaccccacgacgggaatcattacgatatctgctcaaactacaatcgaaacggtcgaaatatataatatagccggttctctggtaatgagacaagcccacgtaggtacgacaactatttctctcgacctttccgatcttgctgacggtatgtattttgtaaaagtgaacgatggtaaagccgtgaaagtcatcaaaaaataaaatgctaaactaccccgactcatctctttgaataataaagagatagtcctacacaaaatcccccgctctttttcaaggcgggggatttatacatttctgttaattacgatctctacttttattacctatttttatttctctcgccttaaaaagacaaacctagtaacaggccccatcttacatttgaaactcccccataagttcgtatgtgtctggttcatagccaaaacggaaaaacaaagagaacacaccgagcaaacgaaaaatatcagacccgtagtagaaagaatatcacccaatcccaccaacggagaaacgatacctccaaaagcaaaacctgctgcaccgaacaatgctgaggccgttcccgaattggctcgctcacaatccatggccaaagtcgtagaagccgtaaaagtcaatcccatagaaaaaagcaacacaaacagcacagcctcatatacagcaaaatgatattcgttactaaggattacaaactctaccgcagacatcattgtcataccgacactacctaaaaacatcgcatgttcgggattcttgaattttaccgataatccggcagccaacccgatagccaatgcattgattccgaaaaaaaggctgaactcaaaagccgaaaaaccataatgttgttgaacgataaacggagaagaagaaatattggcgaacaatactcccattgcaaaacccatctgcaatacataataaacatatcgacggtttttcaatactatcccaaagcccgatacaaggcttttcagattccctcgtttccgattatccaccgataaagactccttgaaatgtaaattggagaacagtaacaaaactccgagaatcaacagtacgataaaaatacccttccagccgatagagtcggttaggaatcctcccaatacaggagatgccacaggtgcgattccattgatagctcctataatcgccatagctttggccagctccttaccagtaaatcggtcggtagcgatagatcgggagactacgattcctcctgctcctgcaataccttgtattaaccgaaaaaatataaaaccctctatggtggcagagaatatacagcatacggtcgatacaataaacaatgacatggcgaccaataacggaggtcgtcggccgtaccaatcgctcaaaggcccgaaaaaaagttgccccaaagctaaacctatcatactggacgtcagacctaactgaaccatcgaagcctgtgtcccgaaataatctgtcatggacggcagactgggtaaatacatatcggtcaccaatggaccgaatgccgtcaatgaacccaacaatatcaataaaaatattttagaattcgtatttctcataattttacctcctaaaaacaagacaaaattaccaagaatgtacaaacctatcaactcatgtttttgactaattaaccttttttattcaagaaaaaccctactccacaactcattaaaattcaagttattttaaccttatgattggacaatctaaactattttaagcccaaaggcatacatgtaatttcaaatttcccgtacgaaaatcctctcttcaaaaatgaaaacaatttctaatatcttcttaacaataaggactatatcaaaaacatttttcacatttaaagccatactatcctaaaaataacttcatcgactacatattaacagaaagataccgtatatttgtccctcaaacttttggatatgaaaaaaataataggactttttatattcatggggctgctttccgccacctccgtccaagcacaaaactacaatacgaagtgcttaggcatatcagccggatacatgttcgatacagaaaacgtacaagcaggagttttcatgcatctcccctttgcaaaaaactggcgagtagtgccgtcggtcaactacacattctcgcaccacgacctcaacgaatgggaaatcaacgggaacattcattacctcattcctttcgccggtcgattctcggtatatcccttagccggtatcgcgtttcaaagttggaggggaaatgcgttacaaaacgataaggaactctccaatacccgaaataaattcggaataaacgccggagccggattcgaaatgagcatttcccgccacctaaacctacatatagagggaaaatatattttcataaacgacttcaatcaggctaatatttccattggtctcggatacaaattctaattccccatgagtttgtctccctcccgacgtttccatgtcgtttctctgcaagtcccttttccaccggactatggaggggttatcgatatttactataagttgaaagcgttaaaaaaaatgggctacgagacatggctacacacattccaatacgaccggagtagagccgaacaactgaacgaagtagccgccagagtctcttactatccgcgccaccgttctgttatccgccagctttcgcatatcccttatatagtttccagtcgccattgttcaaaacttctcgacgatctgctttccgacaatgcccccatactgttcgaaggtctgcattgctgcgcctttctgtccgacaaacggctgaaagaccgtatcaaattagtccgaacgcacaacatcgagcacgaatattacaaagaattatcccgcaagacatcagggtggaaaaaactctactacgaactcgaagctgtcaaattggcaaaatacgaaaagatactcctgcatgccgatgccattttagcgatctccgagagcgaccgctgttatttctcgtcgagatacccgcaaatcccggtgtcgctgcttcccgcctttcacgcatacgccgaagtagcccctgccggcccgaaggagaactatatcctttatcacggaaacctttcggtcgaagagaacatcgaagccgccgaatacctgttacggcaagtcgccccgctcacacaaggcacatcatggatattcgccggaaaaaatcccccggaaacactcgttcggctggtcgaacggacacccggcgcacaactcatcgccaacccctcggaagaacaaatgaaccagcttatcgaaaaagcggcagccaacctgctcgtcacattccaacccacgggattaaaactgaaactattgaatgccctctttcacggaggacactgtatcgtaaacagcaaaatgctattcggcacaggcttggacaaagcctgcctcattgccgatacgcctcaggctatggctcgcgctgtcgaaaccgccttaaacgaacctttcgaccaagccaaacgcaccgaacgaatacagctgctgaaagcgtacgataacgaaaagaatattcatatcctctccgatcttctcgaagagaaactcaggtaaatcacaaataaacaatcattcaacccctctccgcagaacaaagttctgtgggtctcccctattgctaacgcaacttcccgtaaggctacgggacacggcaggggagaagggctaataccttcgataacgagaacagagtgatgcatatctctctccctctgtgttcctgaaaggaatatagggggagtgcccgcagggcgagggggttgaaaagaatatcaaaaataacatttcaatcctctccctgccgatagggaaagtacccgtagaaaaaagaaggaatgaaaataaacagtaaagccaaaatgttgaacaccaacaccctcttcccttgccgtgttccgcagcatggcggggtgtttttgcaacgcaaaatataggggaggtgtccgaagaacggaggggttaaagaaaaagacaaaaaagtatggctattctacctttaccgggaaatccaaagccctcataaatcctatatgatttatgagggctttctatgaggaacacttcgaatgagcctaaaaacaattcggctatactttatttataatctttcagcatctcctgcaaacgttgacgggcaaaaaagattcggctttttaccgtgcccaaaggcaaatccattttttcggcaatctcgtgatatttataccctgccacatgcatagaaaacggtatccgatactcctcgctgaaactattgatagccgttgtaatctccttcaccgtaaaagaaccttccggcgacgcgaatcccgagtcttggggcaaattcaagtgatacagatcttctgtctggtctataatagtctggttccgtacaaccctgcgataattattgataaaaatatttcgcatgatggtaaacacccaacctttgaaattgacattgtcgatatatttatcttcgttgtcgagagctttaagagtcgtatcttgaagcaaatctttcgcttcttcccggtttgcggtaagcatataagcgaagtttagcaaattgtcttggagacctaacaatctatcttgaaattttagagagttcataattgaaaattttgatgattttgtaattcttgtttactacttatactactactttgtattacgaaaatgcatcgaaaatctactcatactaactactacaatctgaaatttctacattctcctaaacgtcttcgaaacattcagctatttcaaaggggctcaaaaaaaatctgttttcgcaaaatacaatcccataatattgttctgattattttttatttactttgtaacatatttcttatcttttttaattgtgcttcttaatattaaacacataggttcatgaaaaagtttcacaaatatatcttttttctcatattatttttccagtattttgtatcgaattcacaaagcactgtttatcaaatagatataatcaaagaaatcgggagtacgacttggcgatatttaagagccggtttacaccaagcccaagaacaaaatgcaaaagccgtcatactacggctgaacacctacgggggaactgtcgttcacgccgattccatgagaacagccatactcaatgcacccattcccgtctatgctttcgtcgacaacaatgccgcatcggcaggagcactcatcgccatagcctgcgacagtatctatatgcgcagcagcgcaagcatgggagccgctacggtagtcaatgaaaccggagccgccatgcccgacaaataccagtcatacatgcgggcgaccatgcgggcgacggccgagtcacacggaaaagacgaatcgggaaactggcggcgcaatccgctcatagccgaagctatggtcgacgaaagagtaatcgtccccaatctttgcgattcgggcaaagtactcacccttacggcaaacgaggccatcgcccaaaaatattgcgaaggcatagtcgataacgtcgacgagatcatttcgcaaaaactccggtacgagacttatactttacaagaattcaaaccctcgctcttcgacgatatcgccggttttctcactcaccccgcctttcaggctctcatggtaacgctcatattcggcggtattttcatggaactgaaaacaccgggcataggattgccctcggccattgcctgtaccgcagccgtactttatttcactccgctttacatcgacggattagctgcgaactgggaaatactgcttttcgtcatcggcatcattctgctcattttcgaatttctcgttattcccggcttcggtatagccggcatttcgggctccattctgatattaggagcactcattttggcattagtcgggaatgtcaatttcgatttcgacttcgtatctgccgccgacatcagcaaaggaataataactgtcatctcgggagtcattatttccgtagctttactcttttggtttttccaaaaaatcggcagtaaaggccctctcggacgtttagcccttcaagcagatcaagccacagaaaaaggatacatcggagttccctccgaattacaagaatatatcggaaaagaaggactcgcggcaaccatactccggccctccgggaaaataaccatcggcgacagacagttcgatgccgtagcccttcacggatacatcgaaaaaggagcgggtataaaagtcgtcaaatacgaaaacgcgcagctctatgtgatcgaaatcaaataaaaaaacgttataagaaattcaatatgaaattcatcggtattattccggctcgctacgcctctacccgattccccgggaaaccgctggccgacatgaaaggaaaatatatgattcaacgagtctacgaacaagcccgcaaagtcctcgacaatgtatgtgtcgccactgacgacgaccgaatattcaacgccgtggaatctttcggcgggaacgttgtcatgacatcggccgaacaccgtagtggaacagatcgttgcttcgaagcctacaatcgtctgggcggaaacgaagacgtaatcatcaacattcaaggagacgaaccgtttatcaaacccgaacagatcgagagcctcatcgcttgcttcgattcgcctcaaacccagatagcgaccctcgtgcgccccttcgaggtaaccgaaggttacgaggccctcgccaatcccaactctccgaaggtcattctcaacgacaaaaacgaagcactctatttcagccgttcgataattccctatatgagaaatatatcccccgaacaatggcccgataaacacgtttactacaagcacatcggcatgtatggatacagagccgacatattgtcccagatcacccagctaccccagtcgtcgctcgaaatcgcagaatcgctcgaacaactccggtggctgcaaaacggctatacgattaaagtgggcatcaccacacaagaaacaatcggtatagatacccccgatgatttacaaaaagcactcactctactctgaaaattatgacgttagaccgaacaacgacaccgcctgtcggaacatttccgcccctatccctgcccgcacccggcatccatgctttatcgaacgacatcgaagtcatcgcctgtaatcggggtgacgaagacgtgtgccgcatagaccttatgttcgaaggaggttactataccgaacagaaaccgggcacagccgccctcaccttattgatgctcaaagaaggcgctgctggaaaaagctcggaagagatagccgaatcattcgactaccacggagcatggctgcaaacctccgcatcgagtcactatctctatgtcacgctctacacgctcaatcggcatctcgatacctgcctatctctactggcagacatcgttatacgacccgatttcccggaaaaagaattcacccggctcaaagaacggcgtctccaacaactgctcgttcagaaagaaaaagtagacgtcctcgcctccgagacttttctctctatgattttcggggacaagcacccttacggacgggctgtcacccccgaccatataaaccatatcacaaccgaagacctccgagactaccatcggcagcacatcgctcccgggagatgtcgtatcttcatcgccggaaaaatcaccgggaaacttctcgataatttggaactccacttcgtccacacatggaatgtaccctctgtcgattctgcgataatccccgctttccccatacatcgtgccgaaaatccgataatagtcacccacaaagaaaacgccctccaatccggaatccgaatgggactgccggtcatcggccgggaaaaccccgatttcttcgccctgaaactactctgcactatactcggcggatatttcggcagcagactcatgtccaacatacgggaagaaaagggctatacctatggcatatcctcctctatcgcagccatgcgatacggaagctatttaaccatatcgacccaaaccggaaccgaattcacccgcccgctcatcgacgaagtcttcgtcgaaatagatcgactcagaaacgagcccgtcccgaccgacgagttcatcaccgtacaaaactacctgagaggagacatggctcgtactctcgactcccccttttccatagcggactactacctttcattgaaagccaacgatctccctgtcgaatattttgcgcagcaagacgaagccatacggcaactgtcacccggcgatctactatcgacagcacaaaaatatctcgtcccctcacaattctacatagccgtcgccggagacaaaaacaaaattcccccgctctccctaccttgataaattctttctcctctaccacgccccctattgttactcgacaccccaatgctacggggggtggcgttagccatatagaggaggtggcacgtagtaacggaggggttgaaaacggcatctcatcagccggtttatattggacatttaactccctcgcccgatgggcactccccctataccgctacgcgacacagggggagagggctaaaatgcgcttcaaatatttgaaactcctccattgccgtgccccgtagctttatggggtatttctgtttcactatcggagacatttaaaactcctcccctgtgttttgtaacgcaaaatataggggaggtggcacgtagtgacggaggggttgaaaacnnnnnnnnnncctcatcaaccgattcatatcggataaatcacattttcaccatacgtttgggggacccgctccaagagcaacccatacaataaactgtttcaagatcgaaaccatcaagagtctcgccctctttgcgggcaacgactacccctccatcggtcacatacaccgctctacgctctcccttaccgttcttcacatacatcgaagacactttacactgcggacaaagcaattttctcatcgtacaaatagtttacccaatcgataccgaatatacaaaaaaaggacctcggaaaaaacaattcttccaaagtccctttttcaatcacttataagaaataatccttgacaattacctctcacccagtttctcgtccatatacaaaatactggcttcgtctttacaacgtttcaacttctcgacaatgcccaaagccgtagcctcttcttctacttgctcacgcacatagccccagagaaaatcttgcgaagccttatccttttcggaagaagcaacatttaccaactcgtcgataagagaagatacatggcactcgtgtttataaacattttcaaaagcatcgagcacactctcccattcctgaggaacgacatctatcttatctactttggccacaccgccacgcttcgatacataatcggccaagttgtaagcatgctccaactcttcctgagactgttttctcatccaactggcaaatccgtcatatcccaattttttgaaataaaacgacatcgataagtaaagattcgacgaccacatttcagccgcaatctgaacgttaatggcttcttgtaatttctgtgaaatcataatggtttatttttatatgttaatactcattttcattacatattgataatatacaaaaattataccatcacataataataagactttaccataacctaaaaataaaaaccaagacaatacaacctctttaatgacataattgcagaatcattttgtccgaatttgacattctttgagacggattacagaatacaaatacatagaatacaactaccaataatcctataataaagccagcaagaacccacgatttgacagtagagtcgacacgtagcgcatcatcgtatctacggctatcggagtaattatttatttcaaggtataaagcaacgctcgcccggattttgtcattgagattcttgcaggttttgtttcagccccttcgccctacgggcactccctcctatatcgattgttgcgatacagagggaaaggattaaatgtgttgctttgaacggtctttttatcttttcggttctttgtgagtattccccccttctcccctgtattgcgcagcaatataggggagagacagaggagcggcagcgacgaagagaggggttaaaaaagaagcacataggatttttttgtagaactaaccccctcgcccgatgggcacttcccctataccgctgcgcggcacaggggaagaggtttaaaagtgtcgcttcgaatattttaaactcctccattgccgtgccccgtagctttatggggtatttctgtttcactatcgaagacatttaaaactcctcccctgtgttttgtaacgcaaaatataggggaggtggcacgtagtgacggaggggttgaaaacagcctctcatcagccgatttatattggacatttacccccttctcttacccgttaaaagaacatttccggctaaaatattccggcctatgggagaaaacgaaaaaggaaagcatcggagagaaaacaaaaagcacctgcgaccaaacggccacagatgcttatacataataagatacaaatgattacttactcaaagcctgagctacatcaacagcacaagccacggtgcaacccaccatagggttattaccgataccgaggaatcccatcatctctacgtgagcaggaactgacgaagacccggcaaactgagcatcgctgtgcatacgacccattgtatcggtcataccgtaagaagcaggaccagcagccatgttgtcggggtggagcgtacgacccgtaccgccaccggaagctaccgagaaatatttcttacccttctctacgcactctttcttgtaagtacctgcaacggggtgttggaaacgggtagggttcgtagaattacccgtgatagatacgtctacaccttcgtgccacatgatagccacgccttcgcgcacgtcatcggctccataacattttactttggcacgttcacctttggaataagctatttcacgaactaccttcaactcgcccgtataatagtcgaattgtgtttgaacgtaggtaaatccgttgatacgcgaaatgatttgagcggcatctttacccagaccgttcaaaatacaacgcaaaggttccttgcgcactttatcggccttagcggcaattttgatagcgccctcggctgcggcgaacgactcgtggccggcaaggaatgcaaaacatttcgtctcttcgcgaagcagacgagcggccaaatttccatgtccgagacccactttgcggtcatcggctaccgaaccgggaatacagaacgactgcaaaccgataccgatagcttcggctgcatcggcagcattcttacagcctttcttcaaagcgatggcagcacctaccacgtaagcccattttgcattctcgaaacaaataggttgtgtctcttcacaagttttataaggatcgagtccataagattcgcagatagcgttagcctcttcaatatctttaataccgttagcgttcaaagcggcaagaatttgcttgatacgacggtcttgactttcaaatttcacttctctaatcatagtaacttcctccttattttattcgtgacggggatctatatatttcactgcaccggcctctttggtgaaacgtccgtaagttccggttaccttcttcaatgcctcgttggcatcggttcctttcttgatttcgtccatgaatttacccatgtgaacaaattcatatccgcagatttcatcattttcatcaagagcaagagtttttatataaccctctgccatttcaagataacgaggacctttggccaatgtaccgtacaacgtacctacttggctgcgcaatcctttaccgaggtcttcgagacctgcaccgatcatcaaaccgccttccgagaaagccgattgagtacgcccgtaaacgatttgcaggaataactcgcgcatagccgtattgatggcatcacaaacgaggtcggtattcagagcttccaaaatcgttttacccggaaggatttccgatgccatagcggccgagtgggtcatacccgaacaaccgatggtctctaccaatgcctcttgaataacaccgttctttacattcaacgtcagtttacatgcaccctgttgaggagcacaccaaccgataccatgagtcaagcccgaaatatcaatcacttcttttgccttcacccattttccctcttcggggataggagccggtccgtgattaggacctttctttacaacacacatgtgttctacttcgtgtgaataaaccataattcgctctttttatttgatgagtatttttacgctcttttcagcgttgcaaagataattttttttctttatgtaagcaatagcaaatttatttgtaacggctcaaaataattatatcgcggttcaattgttttcagaatagtcagagggaataatgcccatttttttcatgagaaaacaggcgttcatattttcggctatacccggctgtaatcgataagaaaaagtaagttcgtctccttgtatagctgcctcgaaacgataattgctgacttttccgggcagactatcggcaagtttgcccaaagccaaatcatgagtagcgataattcccgttgctccggccccgaccaactgacggataagagcaagcgaaccggtctgcttatcgaccgagttggttccccgcagtatctcgtcgagaataataaataatttctccccacgacgtaaacgcaaaacgatttgctgcaaacgtttcaattcggcaaaaaagtaagactcgttatcggcaagagaatcagaggcccgcaatccggtaaacaaaggcaacggagtaaaagtcatgctatcggcacaaacgggagcgcccatgcagccgagtaaataattgattccgatagtcctcaaaaacgtactcttcccggccatattggctccggtgataatctggaaagaagcctcgttcatgggcgcaacatcgttacagacgcgcttctctctcgggataagcgggtgtcccagagcttcggcctgcataaccggggtgcgatcttcccgtatatcgggaaatacatagtcggggtaattgtatcgaaaagttcctaacgagacatatacgtcgaaccgcgacaatacatctatccattgcgttattttttcacaattgtcacacagccatcggtcgagcgcgttgatttgccgcaaatcccaaagcagaaatccgttcaacaaggcgaatcccacgaaattgtagcgttggtcgagattgctgagcaaatgccgtaaacgggacaccctctgcgagacagagccgtcgctgtcgacacaccggctttgtaactcactcaatggcttgcaccggaatcgcatccgctccatcatctcgaacagacgtgaataacgagaaagcgattgaagcgtccggttgagctgttcttgtatgcgggttacccgcttggcaaatagaccggacaaaaccagcaacaaaatgaaaaccgccacgatcacattccctgcgaccattcccgttaaccataaagcgaataaggcaagataaaccgcaggaaccgcataaaccagccaacacacaatccgccccgttccgaaccgaggcattccggcaagccgttcgatagcctcggtatctacccggctctctcccgaacagcccccgtatgattgaaaatctatcctgaaatccgtatggcaggacatttcctcgacagcctcctgcctctcccgaatagacgcagttttcaaatcggggtgaagcaactcccgggacaacgcaacacgccctactgccgtcgccgtgcgattgatataggagaagaacgacctctcgccgaaaaggtcgaggtcgaagctataatcgtgggaagggtcgataaattcactgcccccgtcgattccgtcgaaacgatattccaacaaggacaattccctatgaataatccggtcccgacaatcgacaaattcttttttccgaaaccaacgatcgtgcacccgtgccaacgataggaacagaacgattcctatcagtacagttgtaccccacacctctacgccctcatttctaaataaatacacaatcaatgccgcaacaacgactaccgaaagacgaagaaaagcaatgatacgaatatacatttttatccgctccgtttcccggctattagcttgaagtcgggaacggtaatctcgcaggactttttccataatcaccaatgacaaaaaatgattataccctccacaaatatttcataatcaatcgatcgtaatccttaaccgattcgctcaatgcttcatacggtttgatataagtatgggcaaacgattcacgctctatttttcttttccgttccttgcccaatcgttgtatctcctcgtcttctccgggagttgtagggcgataccccataatcagtttctccatattccaacgattgtgttccacttctgccatcatctcgatcaaagcagtatcttcatcgagattttcaggctccgattttccgaaacttcttcgcttggaagggacagaatgagcattgtaaacattcgaccaacgatgcacggtagacaattcttcccacaatgcccttgcctcgatatcgtccaatgtttgcgggaaaggctgttcgggagttattttatggtaaataaagtttatccgccgtacccgtttcatgcaatcgtcgtctatgtcatagcactcgtccaacatgccgaacgccctcaatttaccgtattgatgagcttttcgtatcaattcgatggtcgaacaggaaacattctgacgcacgagtatcgaatgagccttttcatacacgagccgaggcatataaagtgccgtagcgatactcttttgaggaatttcgaaacagatggcgatagtcaacaaccgtccgtcttcctcctctgcccaatgttgtagcaactcttgtatcggacgactctcgacagaacctttgataaattcaaactctatgtcggtaaatttatcatcggtattcgggttggcataactcttagccggctctaccgtatcgataactcgatagtcgcacatgtcgaacaaagagtcgtatctgccccgcaaccgatcgaactcggtgtcggcattcatgtcgataaaagagattcgagtccgtttactccggtctcgaaggaaattgggataatgggcgatatgagcggctttcacccccatggcgattcccatgctggtcattcccacaatgacgagatggacgtatcggttgctgtcataaccgattccgtcaccgtcgataggtacatagcgtatgacttccgagcccttgtcatgcggagtatacaggcctcgcaccaacaccttctccgcccaagtttcataaaaattaaacggcagaaaatcgataagcctttcgctcaatcgatcgaaagtctgcgttaatttcaataatttctcattctccgcaccgtctttatattttttttggaaatgcaccagccattgcttctcagtcttcttcggaagttgaaatatagattctatatcataccgttgaaatacggcaaaggtcgattgagcttcgaaaagcacattacattttttacaacggctctgtatttgcgctaccaacatgcgcaactcctctatatcccggggctcttttcctgttgcgttcttttcccgcaaaatcctattaatgagagccgcacattcgatattgatcgagtcatgatcggtttcattctcctcgcccaacaaaaatatctctttacaatccagcaaatgcagtttttccaaatcctcccgcgaatcgcggcccccgtgcaaaattatcgtacgacggtcgatagaggcatcaagtttggacaacaactcgtgacgggcagaatcgacactacccgaagtctgaatgacaaacaaataaggtgtatgatccgactgttcggccacactcttttgatacaactgtttgataagcccgatagccatcttatcgaaccctataatcacataatgattcctaaatttatagcctatctgaccctccctcgcacgctctacccggcggtcgataatattcgagaaaatagagatgagcaaaccgcccatcagtgcagacccagtgatcgaaataaggaatgcaaggaaacgattccacgtcccttcgacgacatactgattgccgggatcggcaaaatgataatagacatcgacaaaaatattacgtgggtcgttctccttaatagtaagaatactgcctgtaagccattcgattacgatgaacaaaagaatagcagcaacgataacacccagtaaaaaaagcaattgccatttgatacccgatgacaaaatccggtctataccgataaccgggtgtctgaaaaaatctttcatcaccccgaaaaattcttttagtcttttcatctcttctttacaatatcgaatcccaacgcttgtatcagtttaagcgtccctatcgctgtgttgcgatcgtaatccttttctatttcgggtaattcctcataaggcacgagacaaggatgcgtcttcttctcgtcgtcccgtcgcgctccgtaagtccacccttcggacaaacgagattgcgaccatacttcatgaacatttttcgccattacctcgaccaactccataagttcctccggtagtttttcccggctggtatccgtcggagccggaatatacttttcgcgtttcatcgtcatactgtattatccaagttattttccccaaagataacataaggcaagtacaggacaaaatgaacatgcaaaatactttcggtccccacctgcaaaacctcatgataacatcacaaaactcctcccctgccgtgccccgtagcattacggggtgttttgtaacgcaaaatataggggaggtggcacgtagtgacggagggattagttctaaaaaaattctggtaaagattatctatcttatgaaaaaaatcgggagcttccttttacccaccttttcttttgtagaaaagaagcaacgacaatctacctcacatctaatgtgcgccgcatcacaaaatgctcgtcgagttcttcggttttgaggtacagttccacttcgtaacgcccggctgggaatgggcttgttataccgttcgggccttccagcctcatggaactggacacttcgaaatcttgttgaaaaacatctttcgagtccgattcattagtgactgcatcttgaacactggtataaactaagttaccctccatatagaacttgaatatcaatttcaatgaatgccctttttcaagcgagagccactggaatccggctactaactttttgcatgtattggctttgaaagatttctgttcaatgacttttccctcgtagatgtgcaatgcgcaatcataagtaacccattgttgcaattcttcatcggtattgtaaaaatgaagcaccaaagccaaaggttcgatccagcctcgctgcttaggagatttcacgacctcgaatcgcccacgacccatttctcgattcttatagtaaagagtgtaagtatgagtgccgggagcataagaagtaccggaatcggagccccagccacatatttgcaaccattgggatccatctcggggattgagtgtaactgtgtggtcgaacgctttgattttgcctgtcctttcattcttgatctccacatggtaagtaaccttgcgcacaacgtccgaatagcaggtacatcggcaacgcatttgcatatacttgggctccacgaagttgcctgtattccaatcatcgatcacctcacctttgccattgacattacgaaattcaaagtgcgaaacaatataaatccaaccattgctctcccaaatatcttccagcggagctatttcgagcggagcgctgataaccacatgatcttcttcatcaagaatatcgaaccgccatgtaccgaccgcagtgaaatggtctcgcttttccgacccccaccacgggaattgcgccgacatgttctcaacggattttaacggggcatcgaagtcgtaggtatgagttttgccgcttggttcggtaatgcgtacttttatcttgacggtgcggtcgatgcgcgatgtcatcttcaccacaggcataatatagcgcgagtctgtatagtgtttgctacttggccgggtatcgcgtttgccgtctttacccacttcgcaaaattcgagcgaatggatttcgtacccgcggtctttcttgaacaaatcgaataatcccatagatatcgagacaaggttaatgtgacaatatgcgaatttataaaatgttataaaatttgccaaactatctggggaaaatttatagcgacccatttttcgcatgatacccaaatacacaaaaatcaaaggctggaagggattcaaaaattatttctcgaagatacacctataatataatataacacagaccgaattctatgcaataggaataatctattatctttgcattcgtttacatatgctccattcaaaataaagaaagagacaactaaacaaaatcggccaatatgagtaataatattgaaaatctatttacacaatattatcagatattgcgcgcctatgcattacgttacgttcaaaaccaagatgcggcagaagatattgtacaagacgtattcttcgaattatggctacggcgtaacgagatagatttcgacctcccgatgaaagcctatctattcaaatcggttttgaataaatcgagaaactatatttacgacaaacgcgtaaaagacaaaataagtttcgattcggataacgatatccagttcatagacgactacttacaatcgttcgtcgtttatcaggaagattccctactattaaaagatttggatcgggaaataaaaacctatgtcgaatctctgcccgagcaatgccaccgtatattcatcatgagtcgttccctcaatttgaaaaacaaagacattgccttgcgactggggataagcattaaaaccgtcgaaaaacaaataacaaaagccttgtcgggactaagaagtcatttgaaaaaaaatggattgctatcctttttcttcttactgttttcaggattcgaataaaaaataaattgcttcgtatggacggacagaacgaaataaaagaaatagatagactcatcttgaaatatctcgaaggagaggcttcgaaagatgaaaagatcgcgttataccgttggatcgaactttcggaggaaaataagacacatttcaaagaagcacaggaactgtggctatcgacccaagccatactcgcaccgaaagaagatacggaaaaagcattacagcgtttccgttctaaaatcaagaactacaatcgccgcagcaaaacattccgcaaaccactctactacattacccagtgtgcagccataatagtgatactattaggcttgtattactttttcacaagagaatctaatcccgaacaatgcacttgcgtagagatggcaatcggcaacaaaggctgtattaccctccccgacagcacggtggtttggctcaattcaggcagtaaattgacataccccagccggttttccgataaaaaaagaaaagtccggctcaacgggcaagcctatttcaaagtcttccacaaagaagatcaaccattcgttgtcgaaaccaacgatatggacataaaagttctcgggaccagctttgtcgtcaagaattacatacgagacgaaatcatcgaaacggcattggtcgacgggcatgtagaagtctattttcccaatagctcggttcctcccataactttgcaacctgccgagcaagtcacatactcccgcaagacgaaagaaacgaaaatatatacgcgaaaagatagtagtctctaccacatttgggcacaagaaaaactattattgagcaattgtgaattgacagaagtcatagaaaaattaggcgcatggtataacgtaacaatgacctgtacgaacacttcccctacccctgtttatatgacgctgacggtcagaacagaaccgctgaaagaaatattgcaaacgctcaaatcgatagcccccatagattatcgtttcaataacgacacagtctacattgagcacaagccaaatagttaaaatatattaatacgtactcgttaaggtagggtatgcccactcttgtttgtgataattatagagtggagcacatggaaaaacacaaccgacatatagacgaactcataacgaagtatctggataaatcccttactcgggaagaatgcgccgaactgcgccgttatttggcagaagacaaaaagcatctcgcatattttgccgaaataagagacctatggttatacaatacggctctgtggcaaccggttatatccacacggtcggctctcgaaaaactgaaaaagagaataaggaaatatacttctctcgtaaaaatcagaagaaccgtctattacgcttcccagattgcagccgttattgcgatagcctttatctttcataccgtaaaggaatccaacgtctattccgccacaacccatacggttctcacctcgacccataaatcggaagtcactctacccgacggcacgatagtatggctcaacaataatacgaaactcatttatcccgaagcattttcatcgacagagcgatccgtttatttagaaggcgaagcctatttcaaggtcacgaaaaacaaagcacgtccgtttgtcgtgaaatcacaaggacaagagattaaagtgttaggaacatctttcaatgtgcgaaacagaccgaacgaagaccttgcggaaacgacgctgatttcgggagccgtatccctctgtttcaataatgactccgtgcccgtcagattaaatccgaacgaacagataacctactccaaatcaaatcaatctatccgtaaagacacggtcgtcgctcatgaatatatagcatgggctacggaaaagatgacattcgacaacgacagattcacagatgtgatctcatatttggaagacaaataccaacttcaaataatctgcccggaagaaatcgccgatactttatacctgaccctcgtcgtaaggaacgaaactaaagaagagatattcaaggaaatagcgtgtatctcccatttgcaatactccatacacaacgatacggtctatttcgatttcccggaaaacaccgattgtcaaactttacaacacagcctatgaaacaccatgaagcgaccctaacaaaaaacaagcgattcaatcataaaaaatacgaccatttctcgtaaacacatcgaaagaagaaaccaagttaaatacataaaaccatgaagacccttaaacacaaaaaaacgatcacaaaacgatcttcattcccctacaaagtcataggactggttttgtatcttctatgggttcaaccatttggagcaaatcacctgtacgcatcggaacggaagataaacatcgaggtaaacgacgtgacattaatcgatgtgctgaaacaaatagaagctcaaagcgactatgtgttcttctataacaacgcagacatcgatacagagaagaaaatcagtattaatatgaaagatgcgaatataaaagacgttctggataaaatactgaacgaatactcttaccgcatcaacaataaaaagatcatcatcaccgccaaacgtcaggctcccgttcgcacgaacaaaatcagcggtgtcgtctctgacgattcaggacaacctattatcgggggcaacgtcttggtaaaaggtttaaacaagggaaccatgaccaacatcgacgggaaatacacaatcgatgtacccgacagtgcaacgactctcgttatctcctacatcggatataaaaaacaagaagttgaaatcggtgacagaaattatattccggtaactcttcaaaaaaacgacgttctgatggacgaagtagtggttattggttacgggacggttaaaaaaagtgatttgacgggagctgtatcgagtgtcaaaacagagaatctacccatcgcagccaacacttctgtcacacacatgttggcaggacaggccgccggagtaatggtaaaacaaaattccgctcaaccgggcggaggaatcgaaatatacgtcagaggtgctgcatcgaccggtgcagggaatgaccctctgtatgtaatcgacggatttcccgtcaccaacaaaagcgtggaacccgaaagcgggaaccgctacgaatatggttcccgaaacccgatgaactcgttgaatcccaacgatatcgaatccatagaaattcttaaagatgcctccgccactgccatctacggagcaagagctgccaacggcgtgatcttggtcacgaccaaaagagggaaaagcgggaaacccatagtaaaatacaacgccaactattcgattcaaacaatagccaaacgactggaaatgctatcggctaaggaattcatgaatgtttcaaacgaaatatcctatcaaaaatggcgcatggataacgaattatatccgtatggcggagagctggaagaagacgcattaccctacaagggcaatccatatagtccggaagaaatcgctgccgccggagaagggaccgactggttcgggctgcttacacgcgacggctccatcaaccaacacaacgtatctgtttcagccggtacggaatccacacgatttttggcatctttgaattattacaaacaaaaaggagtaatcaaaaattccgatttccaacgtatatcgggaagaataaacctcgatcaagatttagggaaatacgtcaaagctggtatcaatgcaacatacagcaccattttcaacaataatgtcccattaggagaaggtaacgccgaaaattccagtctgctgaattcggcattgcattacgaccccctcgtcccggtaaaagacgaatcgggaaactatgcgctgagtcccacactgggcatgattcctaacccggtttcaatgctcgaaattacagaccagacgcaaaccgatagattactggcaaacggttatatcgaagctacattctggaaagatttgaaagtaaagctcaatatgggtatcgacaaaaatcaaggtcgccgcagtacctatcttcccaaatcgacactatacggaaaacaagaaggaggaaaagccaatatcaatgaaaatagaacggtcgatttattgttcgaactaacagccaactatacgaagcaacttttcaaggaaagagacagattggaagtattgctcgggtattcataccaacaagagaactgggacggattaggagccggcagctctcaatttttcaccgatttattcctatggaacaaattggaagccgggaatgtggcccgtccgccggtaagttcttccaaaggcaaaaacgaattaggttcttatttcggcagaatcaactattccttgctcgacaaatacctgtttacattctctttaagatatgacggctcttcgaaattcggtaaaaacaacaaatggggtcttttcccgtcgggggcattcgcttggaaaatgcaaaatgagaactttttgaaagacgtcgactggttgtccgaattaaaattaagagtcagtttcggacaaaccggaaacagcaatatcggaggcaatgcctacgaatactatgaagccggtaatcaatatgtattcggagatgctgtacaaacaggcagtatcaaaagccaactcgaaaatcccgacctcaaatgggaaacgacgacagagttgaacgtaggtctcgacttcggatttctaaacaaccgaatcacaggatcgtttgaatatttccacaaagtagtcagcgatttgctcgccttccgcaaactgaattccttgatggaagtctctactattgcagacaacatcggagcgacccaaagcaccggatatgagttttctttaaatacggtaaatcttaccggcccgttcaaatggaacactaccttgaatatatcctcctataacgaccgatggaaagaacgcaaccccgatgtagtcttggcgccttatgaaaaagaagatgcacctatccgggctatctatggatgcgtatccgacggtattctgcaaataggagaaactcctcctgcctccatgcccgatttattgccgggacaaatgaaagtaaaagacctgaacgggtttgacccgaacgacggttccaaattgctcggacaccccgacggcaaaatagacgctgccgacagaatctatttgggaagtaccgacccgaaagttatcatcggattcggcaacatgttcgaatacaagaacttcgatttgaatattttcttctatggcatgttcggtcaatacgtggccaattcgaaccgggcaaaatacgggccctccggttgcgaatacatcttgcaacggcagaactattcgaaagaagtattggaacggtggactcccgacaatcccacgaacaaatttccatcgggattttacagtgcctactacggaggagatgactggctgctcgaaaaagtatcgttcgtacgttgtaaaaacataacactgggatactctttcccgcacaagtggatacacaaagtcttttcacaagccagaatatacgtcgatgttgaaaaccctttcatcattacgaactatcagggattagacccggagatggattcaaaaggcggatatccgtctcaaaggacatattcgataggtatagatatcacattctaaaaacacgtacactatgaagacaaaattcaaacatatactggttattctatgtctctcgatgatttcatgcgagggaaacttggaaccggaactattcgatcaaattacacccgaaaactttttaaccaacgaagacgacgtaaagactgctgtcaccggtgtttacgccgagttccgagggatatccgaatggggacgatacaaaacctcttggggttcggtaatgacgcttcaagaagtccccaccgacctatgggccgcgaattggttctataaagcccatacagatttcatgtggaaagcaaccgactatttcgtctgtgaaatattcgaatttttcgtgccggccataacaaaagccactgctttaattgcacgtatacaagacgcacctgtgagcgacgacataaaaaatcgatatattgccgaattgagagtagtacgggcgctctggatgtacgatctgttcgacctatatgggccggttccggcaatcaccgaccccgaaaaaatactcaatcccactcaggactttacggtaactcgcccctctcgggaagaatacatcacatttgtagaaaccgaattgaaagaagtaatcaatgccaaaattttgcctgtcgcatggacaggtagcgactacggtcatgtaagtcaagcaacggctatgatggtactgctccaactatacatgcacgaaggtggctactgtcggaacaaacacgtcggcgactatctggattatttcaaaaaggccgaacaggtagccaaagacatcatggatttacaatattatgaattgcaggctgaattcaaagacatttggagtcctcaaaaccagcacaacaacgaaatcatcttcgctcttccgagttttcccattccggtaatggggaacaactttcttgcccatgtactacccaccgattacaagtcccagcaaggtatcccgctgaccggttggaatggattcagaaccccgtgggaagtatacgactctttcgatccggccgataagcgcagacaagtacacaaaaccgaatactggaatgggaaagagatggttacaggacgtaccggaactctcgaatatggagctttgcctatgaaatatcaggaaaatgcaaataccgatgggacgaatgatgcatcggaatatgtcatttaccggtacgccgatgtcatcatgttacgtgccgaagctaaaaacgaaattttcggcccggacgggggaggcacacccacggccaaagaactcctgcaccaagtctgccgcagaagtttcgacaattacgaccaaaccgaccacaaaaagaaaatagaccaaataaccgacatagacgcttttcgcgctcatctgcttcaagaaagagcttgggagtttatttgggaaggtaaaagaagaagcgacatgatacgacacggcgtattcatttccaacgcaatcagccggggtaaaaatctggcgaaagactaccacgaactatatcctattcctcaacaaacgatttatgaacttaaaataaaacaaaatgatggctactaatcaaagaaatcttttgaaaaaagcgactttctggtctttatgctgcctccttttctctggaccgatatctgcccaaaaggtatatccggcatacgggttaaacgacttcgtagaaaccgccgatcccgaaacctacgacagcaaacaatgggacgatctttcttcgggacttcacgccgcatgggggtcgatcgatactttatacaaaaaaggaaatgtccccgcaaataaaataaaacaaacgaaagccgtcgtatggaaaggcgaaaaagtaaacttcattgcattggcttataccaaaaacgagataaaagacgtaaaatgcgttacctccgatttaaaaggtatatcttccataattccggcgggaaatgtcaaatcgaactttgtccgatacacactctccgacaagttcaaaatttcagacgaaatattggcttgtgccgctcgaacgccgcataaaacagaaaacagccacctcgtgcccgatgttctcgattatatcccccaaatgacgataccgggaagaaccactcgcccgatatggattacagtagagattccgcgagacataccgtcgggagaatatacgggagagatatttattcgttcggctgcgggtgaagaccaaatactgtctttgaccgtagaagtactcgaccacatagtccccgcaccgaaaaattggcaattccatctcgacctttggcaaaactgtgtttcggtaaaaaggtatcataagcctaccctatggagtgacgaacatttcgagatactggcagagtattttaaaatattggccgatgccggacaaaaagtttgcactgccgtaatcaaccacggaggacaaagtttcgacgactggtacgaaagtatgattctatggaccaaaaaagccgatggcacttggttttatgattatacggtattcgataaattcgtgaatatgatggcttcgataggaatcgaccagcaaatcaattgttactcgatgtatccgtggggagctacacgttacttcgacgaaaaatcaggcgattggatttctatacagccggaacccggcactcaggaatttgcagatttttggaggcccttcctcctcgatttccgggaacacctcaaagaaaatggctggttcgaaaaaacagctatcgctatggacgaaaaactcgaacccattatgaccggagtaatctcttttatcaaagagacaacccccgacttcaagatagcattggccgggggttatatcccctccttgcaagaagacatatacgatctgtccatctttgtgggtcaccccactacatcggagaatatgcaggctcgaatcgcacaaggtaaacccacgacattctatacgagctgttcatggcccgaacaccccaaccagttcacattctcgcctcctgccgaaagtgctcttgtcgggtggttcgcatacgctcagggatatacgggattcttgcgttgggcctataacatttgggtacagaacgttctcaaagatacccgctgtgcatcggctccggcaggcgaccaacacatggtatatcccggacctcgcaactctgtaagaatggcccgcctacgtgaaggcatccaagactatgaaaagttacgagtcattatggaacgcctgaaagggctgggcacgccggaagccaacgaaaacattcaaaaactgcaaagagtattgcaaacattctcattgggagaaatcagcaaagagaccgacaaccgcatcacgagcttggtgaacgacgcaaaagccgtactgaccgaagtcgcaaaagcaacgcccgtaaacatgtccaatctggtgattccgtcgaaagaccgcaatacaatcgaaatttatcccaatcccacggacgacaaactgttcatctcctacgatggagatacagaaaagataagctatcaaatatgctccacttcgggacaagtattgcaaacatcgaacacgaaacccgtctataaatacataaacatcaaaaatataccatcgggtaactacattataaaattcaatgtcggatcgcaagttatcagtaaaaaattcattaaaaactaaccttaaaaaacaaaatcgtatgaaaccgaaaaaaattacttcatgcatgttatttgccatgattttcagttgtggaatgtcattacaggctgcaaacatcaaagccgtcaactttatccacgacaacagcatcagaggctgtgatattcacctgtcacaagaagggaacaagtacttcgccgatgtctacaaccaacaacagaccatcgaaatgtgggtgcgtataagcgaaaccctcgacgcgcaaggcggcgtattgataagcactaaaagtgcattcgtcgatgatcctgccaatgacaacaaatcagggggctacgaactgatgctgcaacccaacggctgggcgagagctacattctgtgtcggtaacggaggtaacgaacctaaatgggtcaatacccagttacaagccggagaatgggcaaaactgtctatggtgatagacgggaacaaactgatctgctataaaaacggagaaaaaacagtggaggaaactttcagcgcaccgatagctgttggcacaggagacctcacattgggcgccaatcccaactgggtagacggcgaaaaatttcaaggaatgataaccgatgtcagaatttggacggtagcccgtacagaagaagaaataaaatccgatttgaattactatttcgcctcaaaaaaagagaacctctttctcaactggaacatgcaggaaggagaaggcacgacattgaaaaacttgatgcattcgagtagaaaccaagcctcgatagttttaatcaacgacatggacgaaacaggaatcgaatgggtggacaatagcggctgcccgatatacgaggaaggatcgtcgagcatagaaactgctcgacaaaaacaagcggcctatatcagcggagacaatattcttatcgacggtgaaaatataaatggagcagcactatacacgatagacgggagattggtcatgagcatttcatcacatcataacaccatagacataagcgatttaactccggggtactatatattcaaagcaataatagacaacaatccggtatctttgaaattaagaaaataaaatcgatcgcttacacgttatggcgggcttctgatttacagaagcccgccatttttttatgcttcaataaaatagcgcaacaaaataccgtccctatacaaaacacaagagaggaaaatgaatcataatataaaaattaaaaccacttcttaaataagtaaagtatgaagaatttgactaaatttgccgatagtagataaaacatagagatatgaaaaaatatttgagtttgctcattgctatcttgtttacattatctttaaatgccggcggagggaaagccaaaatagttttcgactccacccgttatgatttcggttatattcaggaagataaaggaaaggtaacgcactctttcaaatttaccaacgacggagatgccccgttaattatcatatatacgcgtagtacctgcggttgcacggcatcgcatttcaccaaagagcctgtcgcccctgccggtacgggttcgatagacgtaactttcgaccccgaagggcgtcccgggacctttcgaaaagaggtcaaagtctataccaatgccagaaaagcatccataaaattgattatcgaagggattgttgtacctaaaaaataatagttatgaaacaattgattttagaattgattctcattttttccataaccgtatcggtagcccaaccgcaaattgtattcgataataaaaatcacgatttcggtacattcgaagaagaaacaggtccggtcactcacgattttcgattcgtcaatagcgggaacgaacccttagttttgcaaaacgtgcgttccacatgtggctgcaccgttcccaaatacacccgggaacccattgcccccggagactccgggagcattaaagtgacctacaaccccaaaggacgccccggtaagttttcaaaacccatctatataacgaccaacgcttcgggcgatagagagacgctccatatcaaaggagtcgtcatcggatcaaaatcccgtagagcgaccaatccctataaaataggaaccctatcgttacgcagtctgcacataccgctgttcgacaccccgaaaggacacgtaaaagagggacatctattcgtccgcaacgaaggaaaaacagaactggttcctacttttaaaaatgtcccttctcacatctcggtcgagatgatacccgcagttttgcaccccgatgaggaaggtcttataaaaatttattacgatcccgatgttgtcgacgactgggggttccgacgcgacgagtttgatttgggactcgacaacggctcctcgaacgacttcaatacggtcacggtatcggcgaacttgctggacgattttagcaccctctcgccagaacagcgtcaaaacgccggacacatcgagctatcgagcaatgtcatagactttggtatcatcaaagggaacactgctaaaaaacagactttgaaaataacgaataccggaaaaagtcggttgacgatacacaaagtggcgaatgaaaaccgctctctgaacataaaactgaaacgaaatacgctcaaccccggcaaaacgaccgagttggttatcgaagcagacccgtctatggctcgtaacaatttattgaacagccgattgatggttattaccgatgaccccgaaagaccatcggttcccatacgggtattaggttcttttgaataactcttaatttcttgaattatggatcaccccgaaaatgacgctcaatatgcaggacttgcagtaaacaaaggaatagaacaaccgcctatcgtgaatccgtatttgaaaaagatgcggacagcgaaacgtcgatcctttacagcctctgaatatgtcgaaggtatcgtcaaaggcgacacgagcatactcagtcaggccgtaactttggtggaaagcaatctgtacgagcaccagactctcgcacaggaagtcatagaaaaatgtctgccccatgcctgcgactcggtgcgggtgggtattaccggcgtaccgggagccggcaagagcacatcgatagatactttcgggttgcatgtactaaaacggggtgggaaattggctgtattggcgatcgaccccagtagcgaacgctcgaaaggtagcatattgggcgacaaaacccgtatggaaaaactatcgatacaccccaacgcctttatccgcccttcaccgtcggcaggctcgttaggcggtgtagcccggaaaactcgtgaaacgatcgttctctgtgaggccgccggatacaacaacatctttgtagaaacagtcggggtcgggcaatcggaaacagccgtacactcgatggtcgatttcttcctgcttatccaattagccggtacaggtgacgaactgcaaggaatcaaaagaggcatcatggaaatggcagatggtatcgtcatcaacaaagccgacggaagcaacatcgaaaaagccaaattagcccaagcacaattccgtaacgcattacatctgttcccccctacgccttcgggctggactccgcaagtgctcacctactctggatactacgagttgggaattgccgaggtttgggacatgatagacaaatacatcgcttttgtcaagaaaaacggatatttcgattacaaacggcaagaacaagccaaatactggatgttcgaaacgataaacgaacaactccgcgaccacttctatcgcaatcctcaaatcgaaagaatgctggaagagaaacaacagaaagtgttgaacaacgagcaaagttcgtttatggcggccaaagatgtgttagactattatttcgacaaagaaaaataatttgccacttacttctcgatatttatgaaacaggtaatctgtccaaaatgcggaaaaacgttttctttcgacgagtctcgttacgacgtttcctgcaacatatctttcatttgcccggcctgtcgcaaacgattcctaatgacactgcccgagatagacgcatgccacaagaacgacatagacacctctctcggtttcatcacggtattggaaaatgcgttcggataccgacaagaatttcctttacacgcaggcgataatataataggccgtgcatcgaaaggtacggaagtggatatatccatcgaaacgagcgacatgagcatggatcgtcgccactgcatcattaacgtgaaagaaaaaggcaatcgaccgatactcacggtcagagacaatcccagtctcaccggcacattcctccgccatgaattgttgagcgatcgggaacgcgcggtattacacgacggcgatgtggtgacgataggagcgacgacttttatcgttcacattcccgacgaagaagacgaagaatacttcgagtgagtctcgccccgagaattgggaaaaattctcgctaaacctcttatccaccaataaaaacgtaatagatattatccgaaatttttttaccatatccatctaaaattacaaatatgataaaaagaatcgcactattaacacttttagttgcccctttatggttatcggcacaggttcgtacagaaaaactgttagaaaaggggtggaaatttacaagggaagacaatcccgaattcaagacatcgcaattcgacgataccaaatggcaatcggtctgtatcccacacgattgggctatctatggtcctttcagtatcaacaacgacaaacagaacacggcgattgttcaagacggacagaaagaagcgatggaacacgccggacgtaccggaggtttacccttcgtaggaaccggctggtacaggcttcgattcgatgtccccgaatatacagacggaaaaaaatgtacattggtattcgatggagccatgagccatgcccgtgtctacatcaacggaaaagaagcaggctactggcctaacggatataacgcattctctgtcaacgcatcgcctttcttaaaacaaggagagagcaacacacttgccgtacggctcgaaaactttaccgagagctcccgctggtatcccggcgccggtctttaccgaaatgtacacctgatcgtaaccgacgatgcccacgtaccggtgtggggaacacaaatcatcaccaccgcactcaccgacaaatatgcaaaagtaaaacaaacgacttcttggaattacccgtctggaaaatccctgagcgactatgtcatcgtgactgacttggtcgaccataacggaaagatagtcgcaacgaatcgcaaacaaggaagcgatttcgacaacgacctattcgagcaagaatttgtaatagaaaatcctgcggcatggactcctgagacccccgacctctacacctcgatttcaaaaatatatgaaggcgatgtgctgaaagaccaatactcgacgactttcggtattcgcaccgtcgaagttcgacaaggcgaagggttcttcctgaacggcaaacgggtgcaattcaaaggagtttgcaatcaccacgatttaggcccgttaggaggtatcgccaacgaagcgggaatacgtcggcaaatccgtatgttgaaagatatgggttgtaacgccattcgcacctcgcacaatatgcccgcacccgaattgattaaagcctgtgacgaaatgggtatgatggtcatggccgaatcgttcgacgaatgggcgacagccaaagtccaaaacggatatcacaccgtattcggcgaatgggcggaaaaagatatcgtgaacttagtacgccatttcaggaataatcccagcgtagtcatgtggtgtatagggaatgaagtccccgaccaatgggcgggcgacaaaggccccaaactgtcgttatggttacagaacatctgccaccgcgaagaccccactcgtcccgtcacgcaaggcatggatgccccggacgccgtagtcaacaacaacatggcggcagtcatggacgtaccgggattcaattaccgcccgttcaaatatatcgaaaattacaaaaaactcccccaagaaatcattttgggaagcgaaacggcatcgaccatcagttcgcggggagtctacaaattcccggtagtgcgacggtccatgcccaaataccccgaccaccagtcctcctcttacgatgtggaacactgcgggtggtccaatcttcccgaagatgatttcatacagcacgaagatttgccctactgcataggagaatttgtctggaccggattcgattacttgggtgagcccaccccctattactccgattggcccagccactcctccctattcggtattatcgatctcgccggaatccccaaagaccgctactacctctatcgcagccactggaataaagatgtggaaaccctccatatcctaccccactggaactgggaaggccgcgaaggagaagtaactcccgtattcgtctataccaattaccccaccgccgagctcttcataaatggcaaaagtcaggggaaacgcaccaaagacctgtcggtaaccgtccataacagtggagactctctatcgacggcgaacttcaaacggcaaaaacgctaccgtctgatgtggatggacaccaaatacgaaccggggactgtcaaagtcatcgcctatgataaggacggaaacgcagttgccgaaaaagagatgaaaacagccggtaaaccctatcgtatcgaactgacagccgatcgcgacaaaatcatggccgacggaaaagacctctcgttcgtaacggtgaaagtcgtggacaaagacggaaacctctgccccacggcagccaatgaaataacctttaaggtaaaaggaaaaggatactaccgggcaggagccaacggcgatcccacatcgttggaatcgttccaagccccccacatgaaagtattctcaggcatgatgaccgccatcgtatcatcgaccgaagaaccggggaaaatcaccctcgaagctacatctaaggggttgaaaaaagctaccctcgttatcgagagcggcaaataatcgatacatatagttctgtaacaacgattcgcccctgcgttttgtttcatacaacgcaggggcgaatcgtttaagaatggttcgtagttgatgatagggaaaccgaccttcataaattgtttattcccgatacccccgattctgcaaaccaccaatttttcaacatttccccgcttacagatacacttcctatcatacattcgcatatagaagctatggtttatttatttccaaacccctccgtcactccatgacacctcaccctatattttgcgttgcaaaacacaggggaggagttttaaatagttcaatagagaaaaacacccgcgtgaggctacggaacatagcaaaggaggaggtttaacacccttctgcaacattattttatctaatgagatgattgtatttatccttctcccttgccgtgccccgtagcattgcggggtgttgcgttagtgatataggggagacaccgaagaaacgacagtttctgaggagaggggttaagaagaataacttagaatataatattagaaagaaatgaagcattcaacctctccccctgtgtcgcacagcgatatagggggagtgcccatagggcgagggggttgaaatatacaagaacaatctacactaattatcgatgaaccttaatctctacttaccaagaacgaaaaaaaatacccccggcacagaacgctctgtatcgggggattttgcaagccgcaagtgcggattttttgttgaataattatatgcctttcggcagcaggcaacctgcttgttttctaataatcggtcttatcttcgtgagacttcaaaacggtttctcaaatagttccgttttgttccaacatcaacgttttggtaggctggtcgcaaacctcggtaggaccgaaatattgtataggaccgggatagacatagcacgtgttcatagcccactcgtcacgatgtgaggcgaaatatttgaaaggagccccatcgaggcgaaccaatgctttttgtataacaggtttcatttctccgtgacggcgttccatattcatcatcatagtcacaggcacgcccccggcaatccactcgctggccggtttggtcgtgttgcgaaccgacgacatataacccgttttaccctcgcctaccaacagtgctgcggtataaccgagagaataacaatagtcggcatcgaaattggaaggatcggcacaacggccttcgtaaccgaagaagtggaattgcgtagcgaatttacccacgaatttcccttcggctttcatttcggccaaacgacgtccgaccatctcgcctaacagtttttcggtttcgataagcgatacctgaacatttccgtgggggtcgcggtcgagcgtgagctgacgggcgacaccttcgggcaggctggcatagatagccgaattttcgggagaaaggtgtttgatgatataattgatttgttccgatttcttaatcattgcgaattccgaaccgttcgcagccagatagtcgttcaactcggcgataaggcgcttcatggctgggataaattcgataagtccttcgggaatcaacaccgttccgaagttgttacctttggcggcacgggcagccacgatttcggcgatatagtttactacatcgtcgagagtcatctgcttggcctcgatttcctctgaaatcaaacaaatattaggctgagtctgcaaagcgcattccaaagcgatatgcgaagccgaacgtcccatcagcttgataaagtgccaatatttcttagccgagttacagtcgcgttgtatgttaccgattacttcggaatatactttacaagccgtatcgaaaccgaaagaagactctatcatctcgttcttcaagtctccgtcgatagttttcgggcaaccgattacctgaactccggctccgatttgtttataatattcggcgagcacgcaagcgttggtattggaatcgtcaccaccgataataacgacagctttgatacccaactctttaataatttcgagaccactgtcgaattgatccttcgtttccagtttggtacgtcccgaaccgataatgtcgaatccgcccgtattgcggtagtcatcgataatatcggccgtaagttccatatatttatgttcgatcaatccgccggggcctaaaaggaaaccgaacaaacgactctctttattcagagctttaagaccgtcgaaaagaccagaaattacattatgtccaccgggagcttgaccgccagaaaggataacacccacattgatagccggatattctttctttgcagctgcttcgaaacggagaacaggcatgccgtatgtgttaggaaataacttagcgatagcctcctgatcggcaaccgattgcgtggccttgccttcgacgatggtaacgccgtttttaatagcttcgggcaacttaggctgatacgaagcacgagcggtttgaagtgcacttttcttcattgtaatctcttttgtttatgtaagttttatatttctttcggatttgcaaatttcgtatttttttttcaaagagccaaatacagaaatattaaaatcatatcggacaaaacggtcgataaacattaccccacgcttcactcctcgtcatacccgaaagatttcccggaaaagaaatctccggtaatcatcagacgtgaaatatcccacgcctgcgtctgcctcgaatacaaaggagaccgacggtttcccaaagaacttccgtcccaataaacggcactctcgaccggagtacggaacaaactatatcccaaacctttccaaccgtattcgttacaccccatgacatcgagcaatgtcggatatacatcgatttgccccgccgtctcttcataagaaatcgtatacggagtattcaataaaactaacgctacctcacggtcggcaagtgtcctatgctcgcgcccgtccaacacatttttacccaactcgtcatggtccgaaacaatagcgattaccgagcgttcgtacagcccgcacgctttcagcgaatcgagaaaactgcccaattgtctgtcgaggctatgaaaagcctccatcgtgttgaccaactcgctcgactcggtcgggtatcgggaaagagccgtgggattggacggagccttgttcggagcatgtgtcgaaatagtcactatctgagagaaaaacggctcttgtgtccgtttcaaaatagaaagactttcggcaaacagaaccgaatcgctcaaagtctcgctcgcaccgaacgatgttttatcatataaagtttcaaaaccgtatgccggagaagtttccgcctgattccaatcctgtgcccgatcgcatacgatattcaaggtccgataacctttatctctcaacgcatgccccaaagccggataggtgttttcgccgtacagcacggcggtcgcccctaccttcgcaggtaaaagcccagtattgaatatcaagtggccgtcgctagaccgaccgtcttttacttgcgggagtaaatggagagccgaaaatgtgccttcctcgaccagtagacgattgagccggggcataatctccaccccgttcactgtccggttcaataaccacgaattcatcgattccacgacgataagaataagattccttcccggttctacggcatatctattatcaccataacgcggcatatcgtcaagataagattcaacggttttccgttcctcggcattcagctctccaccctgcaaaagcgaagagacaaacgcatagcacgtataaggtacgacaccgttaaacaccacgtactcacgataattataaggcgtaatgaaagccgtccacggagactcttgatcggaaggcgcacgatgataaatatgatgagctctgaccgcataagaagacaaagctatcgacaacgatacgaaggcggcaaccgctctggtacgtgaagacggataatgacgctgtttcctgaaatagaaaatataccccgccaaaagtaacagagtgggaaagaacacaaatatatcgcgtaaccgtatcaatcccctcacgctgttaagcagcacatcgttgacgttattcacgagaaggaacgacgaatatggcataatatcctcatagacacgagcatataaagtctggataagacaaaaaacgtcgaacagaaaaagcggaataaacacgacccacctcttgttcgtaaaaaagaaaagaggcaacgacaataaaaaagcatcgcccacagtcggcgcaaaagccgaaagcgtatcgcccacaggctttccctgtggaagaaggatacgcaaatcgaaaatagtcgaatatttcaacccgatatgtaaatattcgataggaaacataaagcaacagacagtaagcagataaaacaacagatactgtccctcgcggttccaagaaaaaactcgtgccgaaaatttatccaaccacatttgcattcgataacattcgatgcaaatgtaatgaaataaaaatttatagtattattttatactgaaatatcctttggtaattattttttccgaaatatcccatgcctctatctgccgggaggccaaagaatcgccttcgttaccgtaaactgtcccattccaaccggccgcacttccgaccggagtgcgcaaaatactgtaacctaaacccttccatgcataatcattacaattcattacatcgagtaaggtaggataaatatcgatttgtcccataaccgaagtgtgtgtatatttcacatcagcgttcgccacgatgaacgcagcctctgtatcgttataaccgggtactccgcaaggagagagtaattggttatgatccgaggctatcgcaataactgtattatcgtacaatccgttactacgaagcgaatcgacgaacgctccgatacaacggtcggtataatgaataacctccatataatttctcacctcctccggaaactcagtagcacccgacaacttcgtcttccgatacggctcattataaggcttgtgagacgtccctgttatcaattgatagaaaaacggcgttttctgcacttttattttttcaatagcccgttccatcagcacactatccgtaacacttgttccaccacccaatctatcgatattctggtcatacccgtaagcgacgcttatctcggcctgattccaataattattcccatcgaccgtcatgtttaccgccgtgtaattccgtcgcttcaacgctttggcgatagaatagtaatccacatcgtcatatcgggtagcgacggctccgctttttaagggaagcaatccggtattgaacatgaattgcccgtcgctcgacctaccgtccttcacttgtggcaaaacatgaactgctgtaatcgagttgctgtcgtttacgatccggttcaaacatggtgttatttcttctccgcaaaagctcttgccgatcacccacgagttaagcgactctacgataataagtatcaaatttttgttttcattaaccgaatagatgttatctgcataacggggataagcgtcgagataattttggattcgaattgtttcttcttccgtcaattcaggttggggcaaaagcgaagtagcggcatgatacagaatatatccgcacattccattcagatcgaaatacaatatattattggggaaagtgacaaatctatcggtaagagaatcatactgtttcgattttatatcccgcaccgaaagaaaaatatgaaaacagacaaaaaccgacaagataacgatcaccggccaccataaccgcctccgctctttttgcacttttttctgtaaaacaaatttgtaaagaaccccggtcatcaaagtaggaacgattgccagacagtcgatccatcgcgccgaagcaaaagcactttccaacaacaaaggagtaaggttttcatacaaaaggaaagaagaaaacggtattatatccaaatagttccggtaataccatacggccgacaaacaaaatacatcgagcaaaatcaacggtataaaaacgaatccccgtcttttgacgacaaaaaaaggagacatcaaaaccattgcatcgaacagcgtcttaacaatatgagccggtatcgacgaaagcggattcgtgtctttcactatttcaaaatagaaaagccatatactggaaaatgcagatataagaaccaacgcaaaaagaatgagtgtataaaagtttttcgaaaaaaatcgaatgacagaactccctatatccaaacttttaccaatcattgaaactactctttcattttagaacaaaatatttatccgcttccctaaacgggtttgcaaaaataattcttttaatgaggcgaaacaacctcatttgctcgatttctttcaatccgctctcgataaaacatttattaaaagacaaaacaaaataaaattaaattcatagctttgtttaatattatatgattatcggataaaaaagagaactacaatcattttttctccttcgtatcgaacagaaaataaacatctcgaacatgaaaaaaaggtatatattgctcgttccggtaggcggccttgccaatcgcatgaaagcgatcgactcggcaattaaactaagccgaaaaacaaatagcgagttacatattatttggttcaaagaccgaggattaaattgccgtttcgaccaattattcgaaccgatcgatttaccgaatgtaaaagtaacggaggctacatggagcgattacctgctttacgacaggccccggcagaaaaatattttcattccccgtctttttcaaaaggcaaccttcgataactgtatctatgaaaaacaggccttacaccttttttacgagaacttcgatttttacgactgggcaaagaataggaaagtatatatagcctctttcgtatatttttattctcccgaagatgaaaatgaccgcttctccgtttttcgtcctcttgcttccatcttgcaagaaatagatacccgttgttccctcttcggaacaaatacagtgggtgtccacattcgccggaccgacaatgctctatctatcgcacaaagtcctacccgtttatttatcgagcgtatgaaaaaagaaatagaacagaacggcgacacgacattttaccttgcctccgactccgaggaggacaaacgctcgattgtaaatcggttcggaaatagagtgttcacctctgtccacaaagccgaccgtaacagcttggagggtatgcaagaagcgctgatagagctatacctcctatcgcgtacccgccatgtattgggatcggtacacagctctttttccgaaacggcagctcaaatcggcaagatatcctacgaattgttgcgcgacgttcgccccgataaataattccggccatgcacgggaacaaaatagattcgggaagatttgaaactgtcccgaatctataacctctatcgcacgatacagcgcatcatggccgcagcttgttccgggcggcacaatatctcatatacaagagccgcacaagtataacaaacgaccggtatcaacgaaggaagtaactcataactctcggcatcgcgggcaggataagcggcataacgagccgacctcacccgatgagaaacgacatgcacaggaagcgagtaataatcgatacgtttctggccttcttcgttcgataaaacacatacgggtgtcgaacagcctccccgagtataaaaattgaactgcaactcatattcgggagacgttttatcgataaattccgtaacaggttgcctccacccgtccatacaaaactcagccatacgccacacatcatcgggcaaaagtacatatccgctaccgtcggacgaacgctgtggccgcaacaacgaagcgcaatctgtcaaaggcaacgacgataccggttccgttgcccatacggcaagcaaggcatccggcattttctcccgtatatatcgctctacccctatccctgcggtcatcacgatgtcggaatcgaaagaatcggttagctcctccatgttcgctttaacccggtctaccaactcatctacacttactttcatcacgcgcctttcttctgtctcacaaaattattctcgtccacataaatatcaccctccgaaagaatatcggtccatttttttaatgcacaattcaacccgtcggcagtaaacaaactgcggtaaaccggtaatccggtcccatcgagacgagagatttcgatttgccgaggagaaatcgacacctcgcacgaaccgttttcaatgggccgagtcatttttaacaaagcctctccggctgcatccaaccctatttgaaaaactttatcgccatcacccgaataaacgacaatccccttttgtaaaggacttatcacgacttctccatctccaatgggcacacgcaactccccggcctgcgacaaaaaagttcctgtttctttatgactgatttcaccattgcacaactcccacgaagaaagctcgctcgacacccgaatagtttgctgcccatcgagcaaaaccaatccgttgggcttcaattttatctcgtcggctatggcacaaaaacgagaaagttcttcccaatcattcgaagatgccggcgaagctgtcgtgctacctaccgaaaacttcacctgatagtacttacccataaaataaaccacatcggcgactccaccggtacatcgataagtgaaagatggattccacgtccctcggtagagataaacaggacgcacggcatcgtcgaacgtcaatggagtcacataattccgccatgcagttccgtcccacacaagggtgataattgccgacgaatctgtcgtcacggtcattgccgccgatcctttcaaggcagggaaaacataagcccctttacctccggccacatagatgaaacaagcctgcacaccgctttcgactgccgggctgaaagtcgccggttcggtgataatacccatgaacggagaaggagccgcatgattcgtatcgtaccacgaacgaccggtagaatcccatatccaaatggattgagtttctccattgataaaaaactctcccggcaaaccgccctcgggatatgccgagagaagagatgccaacccataataaaatcccaagcacccgttttgtcctcgcaaatgattgtgtatagtcgttctcatcgcttgttcctcttttttaattgtgaaaaaatcaaattcaaccgttcggccgcttgctcgataagagcaggagaggagacttcctcgtcagaaagcccgtacggctctcttctcaaataatcccttgcgtcctgccaagagcgaacctccggtactaacgtataaattttctcttccgatgccggctgtgcgacgtccgacaatttgaatcgtctcccatacccccgactattttccatagcccgctgcaactgttcgtcggccgtagaaaaaattccgtttacaccgtcactggcaagaaattgtacccgacgaggtacaccgttcacatcgaccgaggtagataggtttcccaaccgggtctgataaatcttcatcatatcattatatttaatttaaaaactatatagcccctcgccgaaacaaccatatctctctcgcaagaacggctgtataaaaatttctcccgtgccatgtaacacaacagtttcaaacaaccatataagagagtgacacgaaaaaacacagtttcgaggagaggccgaattttagaaaaaggggagccgggtaagatgtcccggtcgcccctcagtccccttgaatcatatcacttattcttcatcgggtatgaccggctcgatacgcatgtgagcagccggatagcgcaatgtcaaacaactggcctcggtcagtaccaacgcatcggtattgcgtacccccgattttttcaaatcgagttcctgcgagtcgaacgggacatgagaccatttctggataaattccgggtcgaaaataaatccgtagtcgctcatgccgcaatcgtcgaatacctccgaataaagcacatacagcttcccgaacttcgatttgatttccgagaagtcgatgccccactgaaccttatcttcgcgggccatcaccactttggtcatctctatcttattgatacggccgataaacgaagaaccgccaatcaacaccttccgtttattccctccgttcccggtaaaagcctgtcgcatcatatcgatcaaatcgttctgtgtcatctccacagtaggattgtaggtataatgatttccggcctgccaccagataccgcccgtcagcatcacattctcctttttacgagggtcgaaaatcgtgttcttcacaccgaacataaaactcttttccatacccaatcgcatatcgtaaatagcagcttcctcagcatccgagaaatcccattcgacctctttattcgctattttttggaaagtcgattgctcgatctgcattttgaatatctggcaaaaattctgactcttgataggtaaagcggcgaattgtgccgtctgcacatcgagttccgttgccgcacgccccatacggataagcggcgtattcacgggaatagacggcacgcagttggtcaccgaacctattttggaaccattgatgggatagacggtcaatgcccccgtatcctcgtcttttgcggcgatataaagtaccaagtcggcattcgacatctccccgtcgggatcatacccttttacaccttgaaccaacaaagtttccgacacctcgaatatgctgttgtccacggcattgatagtcgcctttttatgcgagtcgttaacggtcgatgctccgggagccacatacgaggccttcatatatgacttggtaggtttcacatcgaccgaataataatcgacaatcatcgacgaagccttccgtgaaccgttccaccgtgataactgatcgataggcgtggacatcggtcgtattttcacgatacgtttatccacttcgctacgcaacagagagggactcccttcacgaacaatatcggtcgtcaacggttcgttggatacgatttttccgcccgacatacccggcacgatcgccgccaatgccaacccggcatcgaacagtccgtcccaaacttgccaacacagtaccaacaatacgaaaccggtcaaccaaagaagcggctttttccatttcaataaaaaatttttcatctctcttttcattttagaatacaataaaaacataagaattagaataatttagaagctgtttcaatccccttttcaaaaatctacaagtcccacacgctacggcggcgacggtttccgaatacaggcgaaagatcggaatcgggctcgaaactgccgccgtttcgtaaaggaggtaacgaatcgccgttacgttcccgtttctcgaaaacgatacgctcgttacgtccacgcacctcggcttcccgctcggcacaagacaagtcacgatcgtaatacaaccccttgaaaagtaacccgagaacttcgtcgttcaattctcccataaacacatggttgcacaaatgatacacccgatcgagaaaaccctcgaactcctcgtcgctcattcctttctccgacttgaaacgctccatacaacgagtgctgtttttcaagttctcccgcatttggttttccaattcgctgaatcgtgccatgcgtgataggtactcgtcgttcgccttacgaacctcttccatgcgaccctcgtcctcggcacaatcgagcatatctttcccgaagtaacgcacacaagcgataagagcatcctccccgccgataacgtccgagataaacgctcccattttcgggttcgacataaacaatttgcacaacttgctctggtcgtcggcaagacgctcataccgttcgttccgatacgagtcgtattcctccaaagcatcgaacaaatcgtcgtcgctatcgaccctccgggcaggatatcgatgtaagattcgttccacgagcaaatcgcgtgattttcgcagattgcgattttctttttgataattcttttccataaattcaatgattagtttagccatatatggtacggcaaagtaaaccccggtcgaggccgtttttatggcagcttcatacattatacctctttctcgaaagatttcacgacaaaagatgaattaccgaaaaaattctttatttttgtcctgcgagcgaaaagaagagccggctaggcataaaaaacaaacgaatttgttttattctgcacccgcctttcattatttttgcaacacgatcgtcggagcctgcctacacctcgttcggtctccccatcgtcagacaaaacatactaaataacatataactatggctatcacaccgtttaagtatcaacccatgttcccgctcggcgaagacacgaccgagtattatttgctcacgaaagattatgtatctgtaagcgagttcgaagggaaacccatcttgaaaatcgaaaaggaaggtcttaccgctatggcgaacgccgccttccgcgatgtatcgtttatgcttcgccgttcgcacaacgaacaggtagctaagattttgagcgatcccgaagccagcgaaaacgataaatacgtagcgctcaccttcctccgcaatgccgaagtggccgccaaaggagtacttcctttctgtcaagacaccggtacggcaatcattcacggagagaaaggccagcaagtctggacgggatattgcgatgaagaagctctctccctcggcgtttacaaaacctataccgaggaaaacttgcgctactcccaaaacgcgccccttaccatgtacgacgaagtaaataccaaatgtaatcttcccgcacaaatcgacttggaagctaccgaaggtatggagtataaattcctctgcgtcaccaaaggcggtggatcggcgaataagacatacctctaccaagaaacgaaagccattctcaaccccgggacactcgttcctttcttggtggaaaaaatgaaaacattgggtacggcagcctgtccgccctatcacattgcattcgtcatcggcgggacttcggccgagaaaaacttgctcaccgtgaaactggcatccacccactactacgatagtctgcccacgaccggaaacgaattcggacgagcattccgtgacatcgagttggaaaaacaagtcttggaagaagcgtaccgtatcggactcggcgcacaattcggcggtaaatatctggcacacgacgtacgcattatccgtctgccccgccacggagcctcctgcccggtaggattgggagtgagctgctcggccgaccgaaacatcaaatgtaaaatcaacaaggacggtatttggatcgagaaactcgacagtcaccccggcgagctcattcccgaagaactccgccaagccggtgaaggcaacgccgttaaaataaacctcaaccaacctatgagcgaaattctcaaagagttggataaataccccgttgccacacgtctgtcgctcaacggaacgattatcgtcggtcgggacattgcgcacgccaaactcaaagaacggctcgaccgaggcgaagacttgccgcaatatatcaaagatcaccccatctactatgcaggtccggcaaaaacgccgaaaggcatggcctgcgggtcgatgggtcccacgacagccggtcgaatggatccctacgtagacctcttccaaagtcacggaggttctatgattatgttggcaaaagggaaccgcagccaagctgtcaccgacgcctgcaagaaacacggaggattctacctcggcagtatcggaggtccggccgctatcctcgctcaaaacaatatcaagagtatcgaatgcctcgaatatcccgaactcggcatggaagccatctggaaaatcgaagtggaagattttcccgcattcattctcgtcgacaacaaaggcaacgatttcttcaaacaaatcaagcctacatgcccggccaagaaataattggacaaactatctatccgtaaagaaagagctgccgattggcagctctttctttataaacacccctcaatgagacacagaaggaaaggtcgagaagtattccaacttctcctctgttccgatttatgcacgacaccccgtaatactacggggaaacggctgatgaagaggggaataccctattttattactaaaactatccttatgcaatgatgagaaagtctacatttagaacgcgagagatgtgcatatcgccattgaagcgaaactttaaacctcctttccctccatgtccccgtagctttatagagtatttctgtttcacaatcggaaacatttaaaactcctcccctgtgttttgtaacgcaaaatataggggaggtggcacgtagtgacggaggggttgaaaacgacatctcatcagtctgtttatatcccttctcccctgccgtgtcccgtagtattacagggtgtcgcggagcaatataggggaaacacctcagaaacagctgtttctgaggagaggggttaaatacataaaaattctccctccgattttgagaagtgccccccaaaaagtcggatagccccattattttgcccataaagagatacaacatctgtaaactactacacagattcctctgtttttatacaaattataaatattttattacctttgcttttatcataaacaataacataatttgcctatgaaacatagcgtataatttgatacgcacattttagacatattggaaaagcgttttagctttattctgctgctcagaaagtttggcgactaaaaagacagaaaagaataagagttgaaatgctcgcgtttgttagcgcgggcttttggtctatttttctgtcgggttacgccaaacacctctgagtgggaatatactgaaagtaccgcgtttttttatgtgcgtaatctatctctttcaaggtacaaaccggaggaatccgaaaagccgataaatgagtaggaaaatctcaaactaaaaaaacatgaaaaaattaattgttgccattatgctacttggcggaggaatcatattttcttcaaacgcaaataaaccgattgaaaacattgcttccttcgaaacttgtatatcgcaaaatgtcgtattccgttcaacccaacgcctcaaagccaacgacggcagacaaatatatctttacagcagtggaaagtgcgaattatgggacggcgaccggttagtcgtcaccgctacttatagattacaaaatggagaggtgagattattggacgaaaatgggaataccatttataaaggttcttacagattagcacgagacagacgtaatatttcatctctcacacttgccgggacgacttattataaaatgtaatcattaaaaagcgaggcagttagaaaactgcctcgctaaactcactcttatttatctcctctcacttctctccgatataaatcgtgcaagcgccgaaagtgagccgacgacaatagcaatggccgaaacccgcgcgacggaaaatagcgagcatatcctcaccttgtggaacggccgctaccgaacggggcagatagctgtaagcccggcggtctttcgacaccaaccgacccacgaaaggaataaacgtataggtatagaacttataaagctggcgaaacgggaatctttcaggagtggacaactcgatcacacacagtgcgccgccgggactcaacacccggtacatctcccgaaaaccatcttcgagatgttcaaaattacgcaccccgtaggcgaccgtcaccacatcgaaactgttgtcgtcgaatgtcatcgacaagcaatcctgcacctcgaaaagaatccgctcttgtgcatttcgctcggtcactttctcacgagctatgcgcaacatgccttccgacaaatcgatacccacgacacagtctggatgcagacgctcgtccagtagcaacgccaaatcacccgtacccgtagccacatcgagaatacgacggtgagaatagcgacgcaacattttcacagccacccgacgccaccaccggtctatacccagtgtcattgtccggttcattgtgtcataagccggagcgatagaatcgaacatctcccgcacctgcgtcgtcttgtccgtctcctcgtcataaggctttattccctccgctttataatccattcgtcaccaatcgatttttaccggttattttttacggttgttcaaaaaatcggtcacgtgcttttcgatacgggcggcaacgtcctcgccctcggctttcacgaacttttcgcccacgatatgctcatatagctcgatatagcgatccgacacgctgttgcagtattcctcggtcatttcgggaacctgttgaccctctttaccctgaaatccattctgaatcaaccattgacgcacgaactctttcgataactgacgttgttcctcgccacgggcaagacgatcttcataaccttcggcatagaaatagcgcgaagaatcgggcgtatgaatctcgtcgatgagaatgattttatcgcctattttgccgaactcatacttcgtatccaccaaaataagccccttttgagcagccatctcgcagcctcgttgatacaacgccaacgtatatttctccaactgttcatagtcctctttcgagacgatacccctggcgataatctccgccttcgaaatatcctcgtcgtgaccctcatcggctttggtagtcggcgtgatgataggatgcgggaatttttcgttctccttcatgccctcgggcatcgtctcaccgcaaagcgttcgtttgccagccttgtactcgcgccatgcatgtcccgtcaaatatccccgcacgaccatttctaccttgaatggttcacaacgcagccccacggtcaccatcggatcgggagtagccaccttccagttcgggacaatgtccgacgtagcatccaaaaacttagcggcaatctggttcagcacctgccccttgtaaggaataccctctggaagaatcacgtcgaatgccgaaatacggtcactgaccaccatcaccaacagctcgtcgtcgatattgtatacatcgcgcactttgccgtgatacacactcttctgtccgggaaatttgaaatcggtttttaccaaagcatttttcatttctgtaatactttttctgtttatactataatcggttattcgtcttcgataatgaccttgcaaaaaacggtgcaagccgagagctgtaacaaattcatttgagagtgccgaggctcagcccattttcacatctgtgcgcaaagatacaacataaaaacgagatagtgtaccgattgcaagattaagataaatctatttcaaactccctctcgactttcgttttaaacggatataaacgggaacaaacaagcagacaatcatcaagcattttcccgtcagttcgacacaaccctctaaaatggttcgttcaccgctaagtacccgttctatgctgggataagcgaatatagcgactaatgccaaacaacaaacggctaacttcactttatctatccaactcgcctttccggttgaatcctctacctcgtcttcctcatcgtctttatcgggagctacggcagcccaaacccctatcgcataacccaccacgcataacagtccggagagcaaagccttgttagatgacttctcgacaggcagattcccccagtaacaaataaggaatataacagcgaatcctgccaagaatgaaggaaatacccccatccacaaacgagaataaacaaaagcctgcactcggttacgacctggctcgtcactctctcccagccattttctccacaggttaccgcccattactcttctccttttttctcggcttgttcatactttttagacatggaagccttgcgtactttctcgtcgtgtttttcataagcctcgacgatacgctgtactaatttatgtcgcacgatatctttcttgttgaattccactcgggctataccctctacatttttcaaaatccctatcgcctgtatcaaccccgaagtctgcgacgcaggcaaatcgatctgcgtcatatcgccggtaacgatcattttcgcattcatacccaatcgggtaagaaacatttttatctggtgtgtggtcgtgttctgcgcctcatcgagaataatcactgcatcgctcaacgtacgccccctcataaatgccaacggagcgatttgtatcacgttcgtctccatgtactctttcagcttcactgccggaatcatatcctgcaaagcatcgtacaacggttgcagataaggatctattttatccttcatatcccccggcagaaagcccaatttttctcctgcctccacagccggacggctcaggataatcttcttcacctctttgtttttcaacgctttcaccgcaagggctatcgccacataagtcttgcccgaccccgccggaccgagcgcaaaagtcaagtcatttttggcgaaagcctccaccagtttcttttggtttggcgtacgccccgtaatcggtttaccgttcactccgtaaataatgaggttctcctgcggttttatcgcttgcggttcatcgcccttgataatatcgatgattacctcctcgctcaactggttatattcggcgcaatgtttttcaagcaacttgattttctcctcgaaaacctcggtctccttctcatcgccgatcaccttcatcacattcccgcgggcggcaatacgcactttcgggaacaaattcttaatcaactgtacattcgcgttattcacgccgtaaaacgctaccggatcgacagcatccaatatgattactctttctatcattcgattgttttatgttgtgtcaaagatagtgcaaaccgagagcagaaacaaattttagcgacaaaacactctaaccttctcccctgccgtgtcccgtagcattacggggtgttacaacgcaaaatataggggagaaacagaggagcggtagcgacgatgagagggattaaagggaagaaaccgaagaaacaatagtttctgatgacaggagttagacacataaaaaatcccctctgatttcgactgcccccaaacacagcgacattcagcacatcagcctcgtttatataaatagtaactatccctttccttacccgtatgaataagtaagattatccggtctcaaaacaacgaaggataattcatagacagcttttccaagaaactttcggtcaagcgcgacacggcataatctcccaatcgttccaccggaatcttcatatacccggtcatatcgggagcaaactccgtctccaccatgtaaaaacgggcatgaatgatacgatgcgacaacacatgcttacaactatacacctgagacgaaacactcacttgtccggcgccatgaaacaactctgcccaaataccgctacgctgcaagtcatcgagcccctgttcttcatcggtctcgataagcggaagctcatacaaattacgccaaatatcacgtccctcccgccggcgaatccaagtatctccgccctgtctcacataaaaataattgaaataacgaggttttaccaccgtcttaccctgtttcaccggtaactcttctacccgatgagtcgccaaagccatacaacggtcggcaaaaatacaccttccgcactgaggtgagcgaggaacacaatacagtgcaccgaactccatcaacgcctgattatacccgcccgggtctttccggtcgagcaactcgtcggcaagagcggcaaacaactttcgtccctcggtcgtgtcgataggcgtatcgataccataaattcgggaaagaacccgatacacattaccgtccaccacggcatgaggcaacccgtaagcgaacgaagctatcgctgccgccgtataatcccctattccctgcaaagaacgtataccctcgtaagtcgtcgggaactccccgccgaatcgttccaccacctgacgggcagcagtcaacaaattacgagcccggctataatagcccaatccttgccacagtttcatcacctcgtcgtcatcggcggcagccaaagatcgcacatcgggaaatcgggatatgaatctattgtaatactcgaagccctgcaccacccgtgtctgctgcaaaataatctccgaaatccaaatacgatacgcatcggtaatacccctccacggcaacacccggtgattctcggcgtaccacgcatgcaagccggcagccaacggcgcgccctgttcttcttgttctgttccttttttcataattccgagacaaaaatagcgaaaggtgagagcagaaacaaatttatttggtgataccggagcgttacctatttttagacagacttgtcaaacaaacacaaggcaggcatagaataaattttattgtaaaaagcacaaaaaactcattcccgattgagaatgtcgatagaataagagatgccgattcgtagctgagtataaggataatcggacaaaccatgttgcaacatcgcaccgatctcccaattggatatgacatacgaaagttttgttttcaaagacatagggcaatcatgagccaaatgtccatattttttagaattcgattcccaaccactatatccgccaaaagtctcgcttatactgaattttccccatcgtaacccaactaaaactccatactgaaccgcatcattttgcctgccgttgtccgtttgccaacataagaatccgccaccggaaaaaatctgtatcacggcgctcgcaatctggaacgttttacccaaataggtatcaaagaaataaccgggacaatcataataacggtcgatttcgtaacctcctcccgaagcggttttgagggcagctcttaaagtccacgatggcactattctacgttcttcgaagagctgcatgtctatactgaggtatacatctcccgacattttacctttgttttttatatcatcataccattcaatcacaggccaccaaagcgaaagattggctcgatgcgtccataaggggatatgggttttcagaaaaatatccgtcgtataattcttgccccaatagtaatcccctgccaattcaattttaagtttatcactggtttttgtcagtacatcaggaatcgggaaagcattgggaccaaaataatagggcgaaacaaaagtgggcctcgacctcgactcggtaaacccacgggcataaacattcgcaaccggcgacaacaatccaatgctccaaattaacgttatcgaaatataggttttcgtgcggtaatactttcctcgttttccccgcacgaaaaaacgccccgatacccatttgaaaattgtgtacaatggggaggcatgcttaatgataaaatccattggcattcaaaatctatgcgaatgccaatgttcataatacaacaaattcaacggatacaaagcatggacgaaactgcccagaatgcacccgtcggaattggtgttatgaacggcaagtcacgcccatgcaaagcaggacgcttacaacttgttcccgttcatatcaaatgaagtttccgacgtttcattctgtatggaacaaatagcaaacgctattaatattgtaggccatctctatggccctatgtcttttaggtcacaaagttaattattttatcctcgataatcaatactttcctttcgattgtacgatgaggcccggctttttcatctgcaaatatcccttataactcgttttataatgggaaaccgtgtaacagacataataaaacgctacaatacgccactcttttcccaatttataactacttttgtaaacacataacacaagtttcgcatgaataccgacaaacaacgcatatataacggcgattggaaaacattgcatccttactccggctcagcacccaccgacctttactacatcacattggccaataaagttctggctgccattcgagccgtcgaaacctctctcgaagaaagcgattatcgcaaaatagacgagaccgaacaaaaagagcttgcctgcatcctcacggcctatttcgaggatattatttcacaaaccggtatttttcaagccttcactcgtattcacggtaaacgtttcggaaaaccgctcccgttttatacactcgacgaagactatacgcccggcgaaatcaacatcgaagaggtacaattcctcgtgtggcattaccacatgcaactcaacaacctcgacataccctattcacccacactcgatacattcgctgcgatagcctccgacgtgatggaaatattcgagaccgaatacgaatcggctcccgaaaacgaaaagctactccaatacttccgaatcgacgaaaaagaatctcataacctttacgcattgcacgcccgttttctttggctttgtacccagtcctacctattcttcaacaacggtttcttattggaagaccaagccgagtcccttgccgaagaagccaaagaagccggtatggacgagcaaatacccgatatggtaaacctgctttgtaacgacttcggtttcaatcatgtaaccgaatttatgcggctcacaccaccccactggcttgccgaagtattgggagaggcttcccctttacatgcctctctgtcgagtatgggacacaaatacaccggttatttccgttacgaaaacgccgatgagacagtcacccgattccgccacatagcgaccgaccggattatcgaagcgaccaaccgctcgctgatagggattccccgcgatatgaaagacccgtctctcattttacgtaccggattcatacaatggaacggcgaatggtggctttccggacagatcagcagttacgaagatagcgaagacctcatcggacaaatcaccggcgacgatgacgaatacaatctcttcgaacccgaagaagagttacccgaagaggaacaacgaattatcctcaccgatatattggcaacgaccgaaggagaagacggacaaactctcgatgcttccgataccgcttggcaggcactgttaaacgacgaaatcggtaaagacttttttatttcccaagttaaagccggagaaattaccggattacagttctataacgcccccggtcgcttgttactcgacaatatagattttgttaccgaatatgtaaaacgataaatttttaaaattacacccatgaaaaaaaacatttctttactgctcactttattcctatgtgtcgctactctttcggctcaacaagtcgacacgataactatacatagcaaaatggggcacgacctcaaaaacgtaattatcctccccgaaagctacacccatagcgacacccgttacccggtagtgtacctcctacacggatgcggagacaattattcggcttggctgaaaataaaacccgagttgccgcaaatcgcctccctctacaacttcatcatcgtttgccccgatgggaaaattaacagttggtactggaacagcccccgcaataaagacatgcaattcgaagactatatatcagacgaagtgattcgatacgtcgactcccacttccgtaccatacccgatcgcaaggcaagagccatttccgggctcagtatgggaggacacggagccatgtggaatgcaatccgtcaccgcgatgttttcggagccgtaggcagcaccagcggaggtctcgatatccgccctttccctacgaactggaaaatgaaagaccagttgggagaattcgtagccaataaaaaacgctgggacgaacacaccgttattaacctgatcccctctctaaacgacggagatctcgccattatcatcgactgcggagtagacgatttctttctcgaagtcaaccgaagaacacatcaggcattactcacccgtaatataaaacacgattatatcgaacgtcccggaggacacaaccatgcctattggaacaattccatagattatcagctgctcttctttcataaatacttttctcgttcccaagaaaataagagcaaaacaaactagttaacaaaatcaattgatttcactcaaattatgttaaatcaacaacctttttaaggccttgatttggaaaataagaattacagttatacatttgtactatgttttttcatagtattagatttaaggtttacaaattggctgtcgggagacagccttttttatttcaaataagaagctgttttaaaattattccgagacagattgagacctatgttgaagcagattggagtccgagatttttgtcaatagcgggctattgacaaaaatcaagggattcaagatgcaagacaggggttcaatatggccggaacatacctgcttgcaaggataatattatttctcaataaatttaaaacagcttctaaatagtttcgaaaccgaccaataaacaaaagttggcctaatatagggaaagcaccgaagaaacctgtttctgaggagaggggttaaaaaagatcccatagttttttgattgtcttgattgaacctgaacaatttactctcccttaacggaatcttcaaggcaactatctatgtcctaaggcatttttccgatactgcgaaggagtacaaccgtattttttttgaaaagaacgacgaaatgtagaaacagaattaaaaccactacgaatcgccacatcttcgatacagccctcgaaaccggagtcatcgagaatctctttcgccttttccaaccggaacgagttgatataatcgtagaaagtgatacccaattcgttattcagacaattggataaataacttcggtttgttcccatctcgaccgccaagtccgacaacgacaatttggggttcagatagagttccttctctcggatatactcttcgagcttgcctcccatctgcgaaacgaaattacgggatacacccgtttcctccgactccatatcttgcgcctgaggaatccattcttgacgcaaactataatacaaaacaaccgcccacaatacagtagatgaaatataataaaacatatcgcccaaatggctgacattcgtacaaacatacagccaagacaacagacacacggccaaaatagccatactgttcatcagccactgtacattaatacgctcggtataagaatagttatcacgcatataccggttatacctcctcaccctcacgattataaacaagactaccaatgcacaaactaccgccgtataaacgacactcgacatataaacctcgaataaaccggtcattatataaacgacagtaaataaaaccaatggtaattcaaacaaaaggactcgacggagagtagcgaacccgggggacaatatctccaacaagaaaagcgcacaaagaggaactgcccacatatctatcgataaaagaatagtagaataatatggagaatcgccgatagtatctatatacaataacaagtctttcaagtcttggacaccccacaggcaaaaaagacaccccaaaataaaaagaggccgattcgtagcccgaaagaaaaccaaattgattccgaaatataggaaaaaagccgttgacagaccatgtacgaaattcgagagactctcaataaacaatgtatctaaaatcattcccctttttgcttgtaaaaactacaattttcttttattctataacaaacgcaaatatagcgaaaggtgagtgcaaaggcaaacggaaatcttatttccgatttgactatgccgaaccgcatcctatattctacaaatatagcgaaaggtgagcacaaaggcaaaccgaaatctcatttccgacttggctatgccgagctgcatcttatattggcggcgaatgccgcaaatatagagaaaagctcatggagaaaaaaatcgtccctttcatttttcagtttcaatacgaattctattatattacaggaagctatactttatccgacacaattaaccgcattcgacacgataattgctaaccaatattcttatcccatcgcctttacctcctgatacgaacatacaaagtgtaccgacaagaaaagtaaacccgctcgctttgtctttctcccaccttatattatctttgccgagactgcaagaaaaatggaaaaacagaatcaatatgcgaattattagcggtaaatacggacgcagacgtttcgacgtccctacgaatataaaagctcgaccgacgaccgatttcgcgcgggagaacattttcaacgtactcgaaaacctgatcgatttcaagggcatcgaagcccttgatttatttgccggaacaggagccatcagtttcgaattattatcgcgcgaatgcagccgggtggtatgcgtggaaatttatccgacacaatacaattttatccgcaaagtccaacaacaactcaacgacccgaatctgactcctatcaagggagatgtgttcaagttcgtacaaagctgccggcaacaattcgacctcatttttgccgatccgccttacgatctgccccggttggaaaccctgccgcaggaagtgctatcgagaggtcttttgaaaccgggcggaatcttcgttctcgaacattccaaaaacaatgacttttccactcaccccctattcgaccagcaccgtagttacgggagcgtgaacttctcgctcttccgcacgccgatataacacaataagaaaggagccgtgaccgaatgctcggtcgcggctcctttcttatgcacgacaaataccttaacgaacgatcaccttgatcgctttcccgtttaccttaactacatatacgcctctgcttaccgaaatgaccgtgacatcggaacaaatatcgttatgcaatacgataccggacatatcggagactgtggctcgcttgccctctgcaccacgaatgacgatagtaccattctcctcgtatacgcgaatattatccatcgaattattttctatacccgaagtccccaccgtacacggatccgacaatatagattcacccatgttgtaaactaccgatacggcataaacattatcgccgtcggacggagcgttatcggtaaactcggtcgcagccgtattatccaacagctccccgttacgatatacattgtaactctccacagccaacccttcgggaagaaccggttgcggtttataaaccacattgtcgatacccaataagaatgcattcgccgatacacaacgtatggcaaaataggtggtattcgcaggcaagtcgtaagtataagtagcccacgtatctgccggcacagaacttaccttagccaaattgttcgtaaaatcttcgatagcattgcccgttgtcgaataatatacttctatcgattccgtaaagctcgaatcataagccttcgcttggaacgatacggtctgtccgccatcggcaagacgaggagagataagccagtcgtcgttgtgaccgagatcggtcgtctgagggtcggaagaccagcataccgccaacttggaaccatgagaattatccatcatgaatcgttcatcgacacccaatccagctatatgctcggaattcatatcgaaaatcatgaacgcctgcggttgtccggcattaggccaagattgagattctccgaatacataagtattccccccatcgacatcggctaccgtccaagccccgaaaccatcgatggtaaacgggtcataatcctcgaaaccatcggtcacaacctcggctaccggtttggagagcgacggagccgaccacgcaagtttaatggctgcaccctcacggttaccggtcaatccagtcgctacgggataggaagaaccattcactttggttacgaccgcggttttcgtacggttatcgtcttgttcctcatctgaatcataacccacgacaccataaaccgtcaattccgagcccgccatttcgatagaaggcgtataggatatttccacattcacagagctctgagcagccagtgactctactgttttcgtcgccaatacgttaaattcctcatcggtcaaataaaccgcaaattgcgaggcatcccgtacgccttcattcaaaaccgatacgacatatttagcctcctccttgaaattgactttctccggtccggtaatacctgtcgcttgaagattattatctaaataaccgcgaatttcgatatgatccacataggcaaaattgaaatctttgagacactctcccactaaggctatccgcaaatttttggatttgtacgacgcgaggtctatattcacacgagtccactcttcggcgacctcgatagtatctacatcgtgccaatcggcataatcgtccgaaatttggaaacgaactctcacacccccggtcggcatcaatatccaagcattgagacgaggattatcgactgccgaaatatcgatcttcggactgtaaatgcgagtagaagcaccggcggcatatccctggaagtcggcactgcctccatcgttatcctgtgattggtctgctcgtggagtccaatcggaatcataactctttccggcaaggagttcggttgtccacgggccattggtaattgtcgcatcggcaaacgactcggtataaggagccggatatgaaggtcctactaaccgcgagttggattgcgcaggctccgattctcctttttgattcttagcggtcaccgagaaataagacaacacctgcggcatctcgctattcaacgaagtaagctcgtagcggtcgcccgtcacatcgtcggcaaccactttcgaatcggcatcatatacagtataaaccacttcctcgggatttacatatccgccgttttcccccgtctcgggaaccttatcccaagaaagcaagcccgaaccgttcccttcatcggtaaaagttaccgattgaggcgccaacggaacatctatgccaaccaatacggtatcggtcgtaacagccccttctccaaacgagttgcgtgcaaccacactataaatattcaaaccggaaacgaccccattatccacaaattgaagtgcagtcccttttgccggggattcaaacgtcttgaccaaagtctctccacgtctcacatcgacggctgtcaactcggtcaaatctccgcccacaagattctttgtcggggcagtaagcccgattgtaacagacaatgcgccctttgctccgggaataagcgtgagattctctacttctcccggaacatgaatagacatgggctctcccaccttaatattatcgacggtcagatttcccttattggcatcgcttaccgcatggaatccgatgtaatacgtaccgtcggcatcgggcatgatcgagaaagtctcggtcttgggcgatgttctcgtattggtataagtgcgctcctccataatgacggtattcatcgcctcgaccgtggcagccgttcccatcttgatttccatcttttcctcggaacgagcgctcaacacatacgtatcgaatgaaaattcatacatatagcctttcttcaatttcaaaggaggtgtgatcaaccaatcgtccgcattattcttcatgtgataggcataccgaaccgtaccattcgaataagtccacgttttattatcgttattcacatcgaccacagtgaacaatcccaaagaatttttctctgtaaaatcctgtgaataaggaggcagtaacgcatctcctacactcaccgaattggaagatgcgggctcgccttcgataccatcgttataaggagttaccacatagtagtaaagagccaactcttcggtcgtgaatgtgtcggagaaaacactgtcggcatgatttgtggcgacttgaacattatcgggcatacgcacgatcttataacgtaaatcgtccacattcatatatcccccatttttcgtacccgtaggagaattccatgaaaccgtatttacatcgccggtccgaaccactttcaaattgttcactgccaaaggactgtccttgccgatataaacggtcatatcgcttttaggactatcgcccaccgaattggacaaaacgacctccaatttataaatggccgatgacggaacggtcacaggacatgaaaccttcgtcccggcagccgcgacacttgtagccaacacatcgccattacccaaaactttatatgtcacatcaccgttcaaaacatttccatcgtatgtctcggacggtatatcgaaagatacagtaccggaaagggaaccgttctcgaaagagaccgacagattctctggtcccgaaggagctccatcaagagcttcggggtcgggaatataagcccccacgacttgatctccataaggtaacgctccgaccaaagcggcttctcctgttgtcaaatcgaccgtataaagattcgcagcctcgtcttcttcattggcaaaccaataaaacgtattgtcagaagtgttgattacagccgactgagtatattttggagacacttgtgtatctcctatctcccggagtgtacccgttgttttattgatttcatacaagataccgccattgtttccctcggtagccgtactggccgaaataccgtaaagttttccgttagagtcacaagccattacctgcatcggtttcgacaaaagggctatactgtctttggacataccttcgagattccatgtagaaagtacatagcacaactcctttgtcttctcgttataaccataagagcagcaatagaccttgccggtaaccgggtctttggcacaactcactgccgcattccgataaacaggccccaacgaataacccatacttttataatcgagctctgccccggtcacagcatcataaacagcataacgactcgacgacacatatccataatctatggcataatcataaacgtataattttccatcggaataaatcgctccgccgctcgcagacaagcgaggaataagagtcacttctttccgggttaccggagcttgggccgaaaatgaatagagtccgaaagtattgacatctttattctcatcataaacgacagctccgttcaatttcagattcgaaagagaaggagccgcatcgataattacatctgattttttacgcgtcaagggacgaacttgttgaaaaccactttcagaagacatttgccgtttctgaaaattcctcgacttttccaaaaattgccggacaagcacaggatcattcttaacatttcgggcttcatctggaagggttctcgatgttgtctgtgcaaaagcggcagacaatacccctcccgacaaaatggcaagagtaaacaataattttttcatatatacctcgtgttataatataattttattgtaaaaataaagaaatcataattcccaaatacgcttttaatattttttaaatatctaacaaaagtaaatgtatatattattatttagttacatatattcggcatatcgcccaaactatatacaaataataaccccaagtggtaaaaatctccacttggggtcaaacgttctatccgaatcaaattcagaagctgttttaaatttattccgagacagattgagacttatgttgaagcagatgggagtccgagatatgcagtcaatagcgggctattgacaaaaatcaagggattcaagatgcgaggcaggggctcaatatggccggaacatacctgcttgaaatgataatattatttctcaataaatttaaaacagcttctcaattttacacaactataatatctttttcaacacatcgggaatttcgacatcgcaacattcgagctctttcagacaacgttcgccctcctgagtcaaagaaaaatacatctgacgtttgtcgtcatcgcccaatatccgttcgatgagacctttcttttctaccgaacgaatcactttcgatgtattggaatgagtaagccccaactgcttggcgatatctcccgaagagagcctcggctcttgacgaaggcaacacaaaagcatcccttcgttcaggcaaagcccatatctcttctcaaatctcgtttcaaaatcggttatcgctctataaaaatcacgaatcttacaaaatggttccatacttatcttccaatcgatatatagctttcataccacagtggcggacacatttcccgcattcgatacatttatccgaatcgatacgaggcaagccgaaaccggtctggctgatggcctgttgcggacaaatcgaaatcaacggacaacgatgattctgcggacaacggttcttatctacgacaagaggcataaaattactcattttttcaataatacaccatcgattgcctctttaaacgaacttttgggcatcgcccccatagccatttgaggcttatcgttcatgggtataaacaaaaacgagggtatactacggatattgaacaatgccgctaactcttgctcctgctcggtattcaccttataaacataaatctgcccgtcatactccgcagccagctcttccaataccggagccaccattttacacggtccgcaccaagaggcatagaaatcgataatcgccggtttatctcctaaatatatccactcctcgggatttttttcataatccactattttctttaaaaaatcagcctttgtcaattcgatcgttttcattttattttcttttttaccattatttatcgctttcgtttcacaggcggcaagcataagcgatagtatacccaccgtcaaaaacaacactcgtttaatcatatttcttttctcttttgaatgaactcacaaacaatcctcctatcgctgctccccaaaccgtactggcaaaaggagaagaggtaataggacacgtacccgtcgcacaacctacgaaccgccaataaagataaccgcccaaagcacctaacagaatacctgtgaccgggagccaataacgtttcaacagcattttcatttttcaaatttattatttagttcttaatttattttccaatagaaatatattctacaagaaatatcacaacaaatatatctgctattttccattaaaacaattttccacaggaaatatattcaactataacgttttttaaccaccaagtatctaccctatcctctcatattttatttagtttaggcgtagtaaaaacgagcagagggctactttaaacacctcccctgccgtgccccgtagcattgcggggtgtggcgcaaccatacgaacaggggagaagtgcacaatgctatccttataccgaaactgaaacaccactttcaatcctctccccctgtgtttccataaggaaatatagggggagtgcccgtaggacgagggggttaaaacgacagtagagcaaaaatattgaatctcaccctcctcccctgtgcttccgttagggaatataagggaggtgtccgcaggacggaggggttaaaaaatatctgcaacaaaggaagcgtatcaaggcaacaaggaaactatccgcccttctcctccatgcgacaaaaaataaaagagactacaaaaacaaaagatgctgaaaagagagatttgtgagaaatacttcatcggtaaataaagaaatgatacataccattcctctttttttgctaattttgcgacaaaacccacagcgaacaaatgaattacaaagtctttgctccacacgactgccacacagaagtcgaactgccggcatccaaaagtatcagcaacagagctctcgtcataaacgccctgtgcgacgattcgataccgataaccaacgtgtccgactgtgacgacacacgggtcatgaaacaggctttcacgggaaaaaacagttcgatcgatatacacggagcaggaacagccatgcgatttctcacggcctactatgctcaaaaacgagattacgaatgtatcatatcgggctccgagagaatgaaacaacgccccataaaaatactggtcgatgctctacgctctctaggagcagatatccgatacttcgacaaagaaggattcccccctttgcaaatttttgggaaagaactaagaggcggagagctttctctaccgggtaatgtcagctcccaatacatatcggcactactcatgatagcaccttatatgcaaaacggattggagctgaccctcacaggcaaaatagtttctacgccttatatcgaaatgactctcgaaatgatgtctcatttcggtatagagacacaccgctccaacaataccatacgagttccggccggccgatactgcccgaagcaattccgaatagaaccggattggtcggcagcttcctattggtatgaaatcgcggtgctcgcacccgaagccgacatattcctgccgaatctctcgaacaaaagccttcaaggtgatgcccacatagctgcactttttgaaccgctgggtgtttccagcctgttttctcaggaaggcatagaactaagaaaatcggacaaaaccatttcattatacgaacaggacctatccgagcaacccgacttagcccaaacccttgtcgtaacttgctgtttaatagggcttccgttcaaattcacaggcctgcaaacccttaaaataaaggaaacagatcgcatatccgctctacaaaatgaacttattaaattaggatataaactaatatcttcggatagatcactcgaatgggacggagaatctatcactccgaaggttacaccggtcatagaaacctacgacgatcatcgcatggctatggcatttgccccggcctcgtttctcttcccgggaataaagataaaagacatttcggtagtggataaatcataccccaactattggaaagacctctgtaaagcaggcttctcgcttgaaaaggacgaaaaagaaggaacacgattatgattatactcatttcatccatcatacttttaggtattgttacttactatttccatcgacgggatttaaaaaaacaggttgaaaaaactaataaaatagttcaaaccgaaattcaagaacctccgcaagaatgttgcggacggcatctcgtttgcgaacgcgacagcctgctcgccggagtaagcaaaacaatagaatactacgacgacgaagagctcgatgcttggaaaggaatcgaacccgacagctatacacccgaacaaatagaactctttcgggaaattttctatacgctacgaccggaagatgtgccggggtgggtacgcagtttgcaattacgacaaatcgccgtccccgagtcactgcgagacgaaatactgctcgttgtcaatgaacaaagaacgatcgacaaataattgcttatgatagacattctcaattatacattctttcaaaatgctttgtgggcgatactactcatttccataacaagtgccatcatcggcacatacatcgtcgcacgccgcatgctatttattaccgggggcataacccatgcatctttcggtggtttgggtgtagggtattacctcggcatcaatcccacgctttcggctcttgttttcgctatcctttccgcattgggagtcgaatggctgtctcggggcaaatcggttcgcgaagactcggccatagcggtcgtatgggcgttaggcatggcaatcggaatcatttttattttcatgacccccggctacacaccagggctaacggaatttcttttcggaaacattctcaccatcacccgcacggatatattcatctttgcggcctttgccgcattattgattttctacaccgtattgcaatacaagaccatcatatatacggctttcgatgccgactttgcccacacccgcggtatcaagacacgcctcgtcaactatatcatgacattttttgtggcgaccgccgtggttcttaccattcgtctggtcggtatcatgctcctcatctccatactctctttaccgcaaatgatcgccgaacttttctgtcacaaattccgaaatatcgtttggctgtcgggagcaatcaatctcctctgcggcataggaggactgtcgctctcctattggctcgacgtccctgcgggggcaaccatcgtatttaccttaataatcgcctattttgttgtaaaaattatagcttcctacctacattctgcaaccggtaaaaagcaataaaacaggaaaaattcagttttaaaaatggagtattatccctataacatcgattgaaaaaaagaatactacatactatcggtttatttattgttcttacactcgtatcttgttccacgaaaaagaatacggcggtgacacgtttttaccatagctttaccacccgctacaacgtctatttcaacggaatagaaaattacaaagaacaactcaaagagatggaagaaggatacgaggataatttcacggacctcctgctcatgcatccggcacaagcctatgcaaatcccaaagatccgcaaccatcgggaagtttcgatcggactatcgagaaatgccagaaagccatacagttgcattccattaagaaaaggccgaaaagaaattctaaaaaaatgagcgaccccaaataccgggagtatatgaaacgggacgaatacaacccgtttattcacaacgcatggaggcttatgggaaaagcacaatactacaaaggcgatttcctcggagccgctgcgaccttcctttatatatcccgccatttcacttggatgcccgatttggtagcagagtcgcgcatttggcaagctcggtgttacatcgctatgggctggttgtacgaagcggaagatatactgctcaaaatcaacaatgagaaattgcccgaatcccaaaacaactggtttgcgacagtcaatgccgattaccttgttcacaaaggagaatacgaaaaagccattccttttctcgaaacggccattaagtctgcttcgagcaaacaacaacgcatccgaatgacattcctgctggcgcaactctatgcagccacacaaaatcctacgaaagcataccagacatacggaaaagtcatcggcatgaacccaccctatcgaaccgaattcaatgctcggatcaaacaaaccgaagtctattcggggaaagatatttcgaaagaagtaaagaaactcacccgtatggcttcccgggatcgtaacaaagaatatctcgatcaaatatactacgccatcggcaatctctacctgtcccgcaaagacacgctcaaagcgatggaaaactaccgcttggcaaatcaaaagagcactcgcaacggcatagaaaaagccatctgccaaatcacgctcggcaatctctatttcgaaagaagagagtatgtcgatgcccaaccgtgctatgccgaagccattccccaactgaaagaagactatccccaatacgacctgctctcccgacgatcgtctgtcctcgacgagctggttgtctatgcacaaaatgtcgagctgcaagacagtttgcaaaacttggcggccatgagtgaagacgaccggaacaaagccatacaaaaaatcatcgacgacctcatcaaaaaagaaaaagaagaggccgaagcacaacagcgagaagaatatctcgcccaacagcaagggcctcagttcaacaacgacaactcggccaaacaaaatacgacgattctctctggggacaaatcatggtacttctataacaagcctatggtttctgccggtaaaaccgaattccaacggatttggggtagccgaaaactcgaagacgactggcgtcgtcgcaacaaatcgggattctccatgagcgactttgccgaacaatcgggaaacagtgagaatgaagatttggccgacaattctctccccgatgaagaaaaccccgacagcatacaatccgatgcggccgacgatccccataaccccgaattctacctcaaacaaatacctatgacaccggaggcaatggaaacatcgaacgaagtcgttgccgaaggcttgttcaacatgggtattatcctcaaaaacaaactcgaagactatccggcggccatcgccaacttcaacttattggaagagcggttccccgagaacccctaccgactcgacgtatactataacatgtacctcatgtacatgcgtaacggagatgtcgtcaccgcagggatataccgggataagattcgttctgtattccccgaaagcccctatgcgcaagctatggccgatccgcattatttggataatctgcgacgcatgagcgctgtccaagattctatttacgaagccacctatgccgcttatctcgaaaacgacaacagaacggtacacgggaacacgactttcatgaaagaaaaatatccgctctcgccgcttatgcccaaattccttttcctcgatgcactggcctacatcggtgacaaacagtacgaccatttcaaagcaggtttgaaagatctgctcgaacgttacccgcaagccgatgtttcgcctatggcgaccacaatgctcaaaggagtcgctcagggacgtcagattgccgaaggcagcgggaacatgcggggaatgatttggaaggcacggctcaccaacgatacgacgacgttggcgaacgataccgctcaggcaacgttcacacaagacctgaatgcaccgcacgtgctacttctggtctatgcgaccgacagcgtgtcgtccaatcaattactcttcgacgtggcgaaacacaacttcaccagcttcgtcattaaagatttcgacctcgaaataatgacctttaacgaaataagtatgttagttgtcaaaggatttaataactttgacgagttatcccactatcgtcgggttctcgataacagcgaaacattccgttatccgccgggagtaagacccgtaatgatcagcgaggataacttcaagaaactgctcgaaggatacagtttcgaagactatttcttattccttgaaaacaatcctcaaccgacagagccttatgaaaaacggtaaaatactttgggccgacgatgaaatcgatttactgaaaccgcatatcctttttctacaacaaaaaggatatgaagtcacaaccgtatcgaatggacgagatgcgcttgaaaaagcagctcacgagaccttcgacctcattatcctcgacgaaaacatgccgggattgagcgggctcgataccctcggccagatcaagatggaaaatcccgagattcccgtcgtcatgatcaccaagagcgaagaagaaaacatcatgaaccaagccatcggaaacaaaatatccgattacctcatcaagccggtcaatcccaatcagatcctcctctccataaagaaaaatctccaccacaaagagatcatcttggaaaagacatcgagcgactatcgacaggagttccaacacattagtagccaaataaacgactcctattcttggaacgactggttcgacgtttacaaaaagctcgtgttctgggaattggaacttgcacaagccgaaagcgatatggacgaactgctcaccatgcagaagaccgaagccaacagcgctttcgccaaattcgtcaagaaaaactacgaaaagtggattaccggaggcgagcaccccttgatgagccatgaacttttcaaaaccaaagtcttccccctcatcgacaacggggagaaagtatttttcatactcatcgacaatttccgtttcgaccaatggagagtgatcaaacctctgcttaacgaatactttacggccgaggaagacctctatttcagtatcctgcccacagccacacaatatgcccgcaacgctatcttctccgggttgctgcccaaccagatagctcgcatgttccctgacctgtgggtagacgaggacgaagaggaaggaaaaaacctgaacgaggctcccctcattcagacactgctcgaccggttccgcaaacgatatacattctcttacaataaaatcaacgaatcggcattcggcgaaagactcattcaaaacttcccgcaaatcgagaataaccaactcaatgtctgcgtgctcaatttcgtcgatatgctttcccatgctcgcaccgaatccaaaatgattcgtgagctcgcctcctcggaggccgcctaccgctccattaccgagtcttggttccgccactcgtcggcgctcgacctcttccgcaaaatcgccgaaaaagattttaaaatcattctcaccaccgatcacgggacggtacacgtcaataaccccatcaaagtaatcggcgataaaaataccaataccaacttacggtataaagtagggaaatcgctcagctacaaccccaagcaggtatatgaaatcaaaacacccgaacgatacggactgccgtcgcccaacgtcagctccacctacatattcgccacgaaccacgacttctttgcataccccaataattacaactactacgtagggtactataaagatacgttccaacacggaggcatctctatggaagaaatgatgattcccttgataacactcacgaaaaaataaaaactcatgcacacgcttacgataaaaaatctcgaccaaatacaagaaacagcccgccaattcattaagctcatgggcgacaatacggtattcgcttttcacggcaacatgggagccggaaaaacgactttcattaaagccgtttgtgaagaactcggtgtagacgaccccgtcaatagtcccacattcgccattatcaacgaataccggtccgctactaccggcgaactcatctaccacttcgattgctaccggctcgacaaaatcgaagaagcctatgacctcggagccgaagactatttcgccagcggggctctctgcttcatcgaatggcccgacaaaatcgaagagctgctcccctacgattgtgtaaatgtccatatcgccgagaccgaaaacggagcccggtccattacactcgacatctgaaaatcatagtataacccgaacctccaatcctatatttttcttgccaagcgaggcatcgaaaaaataggagaaatatcctcatgaaaaaatgttgaacccgctaccacaatgaacgacaccccggcactcattcctgcactcatcgttctatgcctgtttctcatatcgggcatactgtccctctgtgcggcgatagccgactggaattggttcttcaacagcaagaactgccgcatgctcacatcgagactttcccgccgaaaagcccgttggctttatggaatcatcggctgtctcattctctatatgacagtagtcatcgctctcgatatcttatcaaaaaccccgattatcgacggataaatcaaattgcccccttttctctctttacctccataaaaacaaaaattcttcctcattgttatataaatagattcagtcatattgactcaaatattaaaatataacaataacattatgaaaaaacttttgttgggagcaatctcctttctcgtcctcttctctgcttgtaaagacgatgacaatgtaaacagtaacaccacaccgccggaagagactcaactggtaacccccgaagtaagagcccgtatcgccgaccctcttaaccaaaacccgtttacgggtattctcgaaatttatccgtgtaatgccgaaacttccatttattacgggaactttatcaacggaaataaaactgtattcaatggatactataccatattagacgggcatgtatatggagaatacaatagaccgctccatcttcctctgggaacatacaatatggtatattggggaactccgaaatacgatgaccccatttataatacaccggccattaactcccccggcataacgcaaggagttgacctttccaatttatatttcagattaagggccaataccgataatacttacatgcccgtatatgatttagtgcatgctgtaaaaccggcacaaataggaaaagaagatttacaggcttcattgacgcgtgtaactgccggacttaaaataattgcaaaaatgaagcaaaacgaagttttcagccctatgattacaaacattcaagctcgtatcggaggtattgccgaaaagatgaacttctatacagccgaaactgaaaacaagaccaaaacagtaaaatttaatctggaacgttctaccgacgggacaatcatgagcaacgctacggtcatgctgttcccctccgccgagaatcctcctttggaactgatcattacattggaagacggtagcgaacataaactctccaaaaatttaagttcgaccctttcggaaaacacaaaactgactctcaacatcattttgggagaaatcatgtccggtgaaacgcccggcgacttctctatcgaggactggaacgagataagtgaaactatcgaattcccggttataaattaacaaactatatatattatacttacacaagaaaagcggtcaaagaattgaccgcttttcttgtatgataaccccatttccctatctcgggatatcaagtagaaaatcaaaggggaaaataaacataaattttagcgaacgcaatgaattgcatttatccttctcccctgcttcgatacttaggagaaggttgaatacgtcttgtcttaccggcaaattacgcgataaaagaatgtcgcaaaacacctcccctatcttatctacgatgagcagaggaagaggtgcataccctatttgttgctgccgttgatattactccttctcttctgccatctcccgtaacattgcggggtgtttcagttttctctatcgaagatatttaaaactcctcccctgccgtgtcccgcagcattgcggggtgttgcggagtaatataggggaggtggcacgtagtgacggaggggttaaaaaatatccacaataggagaaacgtatcaaggcatcaacctctctcccaatgtgccgcaaacatcgagaagtatcgaagaaacgacaatccgttattcctccacgattactatttcctcaccctctttaatctggcgatacatagctaccgtcatgaacatagtgataatcatagttacgaatacacctataatcaaagctacgagccctaataaattcagaacgataatcatcaaaatacaaagaaggatagtccacatgtttccctgtgtcatcgtccagcttttacgaaccgcacccatgactccgatagaaaaatcttcgacgtaagcataaacggcgaacatcaaccgcaaagcaatataaaaagacaccaaaagcagcaccaaaaacagaatacccgtcactccgccgaatgcctgtcccataaaatatccgaatgaataaggatcggctaaattaaaagaaaccgcacttgctcccgctccgataaacaaaacgataaagcccaacaccaatggaatacaataacaaacggcaacaataacattcacccctatgagtccgcccaatttcgggagtaattctccgaatactgagaacgaaggttcttccccatcgtatgcattcaataaaattttagcgaatcccgcactgacccacacagacaaaaccagattcactaaatacaaaatccaatagcgaaacgtagttgtatcagctccgctgagcaagctgatgacccacaataaaaccatataacccaaaaccagaccgagcataacgataaaatgcttcttggtcaattcccaaccctttttgagagcgcccgagggcgacagatgtagtgatttcatatcatcaaaatttaattgtgttttcaatacatgccaagaaggtgcaaacgcaatcagaaacaaattcttctgaatatgccgagtgcaacccgctttcgcaacgtatgcaaatataatatattaaaagaaaaaaacataactcaaaaacaacaataatgtaatttttcgctaattttgaaatatctttttttatccaaaagagcgaaaacgcatgaaaaccattcgtatcgaaaacaattttgcacaggtctgccccggcctgaaaattggtatcatcggagcacaagtaaccaacaccgaaaccgatcctcgtctgtgggaacaaatagacgacgaagcctcccgcatcgcagccgcctacaaaatcgacgaaataaacaaacgacccgccatacaagccacacgaaaagcctatcggtctttcggtaaagaccccaatcggtatcgagtttcctccgaggccctttgcaggcgcattatcagaggtctgggaatctatcgcatcgatacgttggtcgatctcatcaatctggtctctgtccgttcgggatactccatcggagctttcgatgccgatcgtatcgaaggagacactctcattttgggagtcgggaaagaaggagaaatcttccgaggtatcggccggggcgttctcaatatcgaaggactcccggtttaccgcgacgataaaggaggtataggcacgcccaccagcgacgaggaacggactaaaataacgctcgacaccaaaaacttgttcgttataatcaatgcttatggcgaagaaatgcctctcgacgaaaccatagccttcacaacggggctgctacggcaatacgcttctgccgagaatatccgcacagacatagtttcggccgaccttttcatcgattaagatcgagtacttctgtaaaagatagcgctgcatttccttgacaaaaagggaatattttcctatttttgctaaaagcatcagcgttatgaaaaaatttcggatttccctcctgtggcaagtcctcatcgccatagcgacaggtatcgcgctgggacagttcctgcccgttcccgtcgcacgtatattcgtcaccttcaacgggctgttcggcaactttctcacctttgccattccgctcattatcatcggactgattatcccggccatttccgatttggggaaaggcgcaggacggttgttactcgtcacggcggccatcgcctacggttccaccgtattttcgggattcttcacctatttcagtggaagagctgttttcccggaactgattaccgaatccgcacacacagcggcgataatagacaaccccggtaacatggcgttaaagccctattttacagtcgagatgcctgcccctctcgacatcatgaccgccctgctgctctctttctgtattggattgggactatccgtagtcaaaggcaacaccctgagaatggccgccgccgatttccgcgacattgtctccttgcttatagcaaaagtcattataccgttattgccgctacacattttcgggatatttctcaacatgacggtttcgggacaagtcgcctcgattatctccgtttttgtcaaaatcatcgtagtcatattcatcttacacattcttttgctgctcgttcaattcgtcttagccggtatcatcgggagaaaaaatccgctgcgattattgaaaaatatgcttcccgcttatgccaccgcgctcggcacgcaatcttccgcagcgaccattccggtcacgttggctcaaaccattaaaaacggagtgagcaaaaacattgccacctttgttattcctttatgcgccaccatacatctatcgggtagcacgatgaaaatcacggcatgtgccatggcaattatgatgatgagcggcatgcccataaatacgacagatttcagtgggttcatactcatgctcggcattacgatggtcgcagcgcccggagttcccggcggagctattatggcggcgttaggcatacttgaaggcatgctggggttcgacgaaacggcacaagctctcatgatagcgctatatattgcgatggatagcttcggaaccgcttgcaatgtcacaggcgacggagccattgccgtcattgtcgaccgaatagatgggaaaaaagaaaatctcatgcagcattcctaaaacaaaaaccgtctttcaaatatatactattaagtaaaatttatttataaatacccaacatattaacactttcagacatgaaaaaaggaatatggatcatcgtgacagccctcctttcgttaggggccatcatcggggcaaatgctctggtaagcacgacaaacgtaaatactatgaagaaaaaattatcgaccgaagaacaaatcaagattgcaccgaaagcggccgtcgactcggcaacggtcgctttgaaaaaagcactgtcccaacaaaatgctccggctgtaatcgccgcacttgtcaaacaatctgcggcacaactcctcatcgacagggacagcctcccggcgattatcgataagacaaccgctctcgccgatcgttccgagaaccctgtcgaacaaagtttgctacggctgttaacagctcagatgtacaatctctatctcgacagaaattatcagatacgctggcgggacgaaatcaacgatttctcgttacccgtcgagtcttggagcaaaaacatgtttaccgaaaaaatagatacgctcctcgcacaagccacggccccggccgaagccttacaaaacacaccgatcgagagttaccgagaggcgctttccatagggaccgactcgctcttccgccctacactttacgacttcgtgctgaacgaagccatagaaatatacgagggaatggacgaatatagcagaatacaaccgcttgtccgccaaaaacttctttccccggcaaaagaatttacaaccgctgtattttccggcaaaacggtcaaggacaatcgcattttgcaactctacgccgatgccttgaaattccatgccgccgatgaactatccgctccatttatgatgtgggatctgaatcggctcgaatacctcggcgaagatatctatttttacgatgaaagttcggcctattacgactacatcggtcaattaaaaacgattctggacgcttaccgggcgaaaccctactcggtcgaaatcgccaccgttctggtctcgaaactacgggaatccgggaaatacgacgacgcccaacaagccctcgacatttgcgaccgatggataaaagactttccgaaatatcgccgaataaacgcactcaaaaatcaacgcaacggactcaccgggaaagaagcatctttcaatctgcccaacgtctcttatccgggtcaaacagatagcgtagaactctcattccgcaacgtcgatacactcaccgtaaatatctatcggcaacccgacacgctgtcgttctatgccagagaacaataccggccgcaacaaaacgattgggatcgcagtaactgcgtttatacccacaaatacggactgaaccggccgctctctttgattcccgacaaaaaaaagatcgcctttccccatcttgctcccgggtactacgtcgtggaaatgctcatcgacgggaaacccggtagttcgactgtaaaccacacggtatcgggcataaaaaccattgtccgcagtgcaggtgaaaaaagcttggaactgctcgctgtcgatgcccaaaccggtaaacccatacaaaacgccgatgtcacggtttacaccgcaaaaaacagaagctatgagcaagtcaaagagataagccggctcaaaaccgataagaatggactctgtataatcgacacgaacgatacccgatattatgctttcgcccaaatatccactccgacagacggttattcacctcttgcagacttatcttacacggactattgggatcgatacgacaaagagaaaaagaccgctcttttctccgatcgctcgctctatcgtccggggcagactgtctatttctcgggaatacgatacgtcaataatacggaagaaagtcgcgtgatacctcgtgaaaaatgtacggtacgattcatcgatccttcttcacggacactgtccactctcgaaatgaccaccgacgaatacggacagttcaacggctcgttcgtagtaccgcaaggtaacatgcttgggaattacaccatacaagtcgatgggtcttgggccaatgcgctcagcatttcggtagccgaatacaagttaccgatgttcaaggtcgaattcgaccccgtaaaagagggaacgagttttggaaaaccgctcacgataaaaggtagcgcagtcagttacagcgaagttccgcaagccggagcagaagtcgaatacacgatttcccgccgaacgaacccgttcttccggctttatctcccccatgaacaaatcgcttctggttcctcggtagttgacaaagcgggtaactttgccatcacgttcaccccgaaacgagagtcttcggaagaaaatatcaataaggaacaagcctatatctacaccgtcacagcgaccataaccgcacctacgggcgaaacggtagagcaatccgtttcggtacaagtgggcgattccccctatttcatttctatttccgcaccgcaatatatcgacaaatataaatcggcaggacaaatcaaggccgaaattcatacgctcaacggacagaccgtacaacgggcctgccgcctcgtattctattcattatacgactccgacgaagaaagtctcgacagcctcaaaataaaaatgcaagtcggcgaagttctcatcgcagccgacgggaaagctgtctatcccgattttaccaaatggcaatcgggcccctaccgtatcgtggcatttagcgacgatgaaacagggcgtatcattcgcaatgaaactaatttcgtgctgtacagcgataaagacaaacggcctccccgctttgccggattatggcttccccgcaccgaactgaccaccgaagcaggcgaaacggtaaaaattcccataggaagctctttcaaaaacgcctatgtcttctattccgtttatacacccgacagcttgatcgaaaccaaaatgataaagctcgacaatcgctgtaaaacaatcgatttcaaattcgacgattctttcggcggattggcgacgatcagtctgctcacgatcaaggaaggggaaatgacgaccgcccaagcgaccatacgcacggccgctcccgataagagactcgacatcaagaccgcctctttccgggataaattgctacccggcagccttgaaaactggaccttctcgataaccgataccgaagggaatcccgtgagcgcacgattcatgaccgagatgttcgacgcttccatgcaggccattcgcacccatcgctggaatttcaatgtgccgactccgatcccctcattgcgtatctccaccactccccgaacagaatatacccacaactactcgattcgtatctacgactttgccgagtcctcctattgcccgatcgaaagctccaccgagtttctcaacttcggattgctgtggtacggtaaagcaagacctctggcgatacgaggtgcggcacaaagcgagggatacgatattgcagatttccgtgaagtaattggagaacaaccggtattggaagaatgtgtcgtaacggaactaagttctgcccaaaaaggagttgctgtcgaaaataaggctatttctatcgccgatatcgccgggacagaagaatctgctgccgactcctatcgcacaagcgaggtaggtacggcattcttctatcccaccctgatgtccgattctctcggcaacgtctccgtttccttcactgtacccaatgaaaatgcgacttggcaattctatgcgctggcatacacaagcgaccttttcacgggacgatacgaagcacaaaccatatcgagtaaaccacttatggtatcgcccaatctgccgcgatttgtcagacaaggagacgaagtcaccgtatcgacagccatacaaaaccgcacggacaaggtgcaggaaggaaccattcttttcgaattgttcgatccttataccgagaaagtctccgactctcgaaaattcgccttcatcgtcgatgccggagaaagccgcacggtcgattacagcttctccgttcccgaaggaatcgaagtattaggcttccgcacaaaagcatccaccctgcaacacagcgatggagaacaacagatactgcccgtattgcccgcaaaagtgctggtaaccgacagtaagccgttctatatccccggaggcaaacactcgacctcgatcacatggtccggcatggacaaaaaaatgaaatcaccgacggtagaaaactatcgcatggttctgcaatattgtgataatccggtgtggtatgcggtacaagccctgccgccgttggccgatttaaccggcgatgatgcgatttcggcaatggcttcgctcttctccaacagcgtggcagtaatgctcgcgaactccaacccccgcattgcacaagccatcgaatcatggaaagccacgggaggaaagaatctctcgtcgctgttggctcaaaacgaagaactgaaacaagtattgctctcggccaccccgtgggtattggaggcagacaaccaaaccgaacgaatgcaacaattgtccacgctcttcgacaaaaaccgggcggaacgactcacccgagaggcgatactcaaactccacaatctgcaaactaccgaaggcggttggagctggtttagtggtatgaaaactaatttcttagtttctataaatacattggaaggcttttcgagactgcgaaaattaggtattcctcttgatgaaagtgaaataaaagaaatgcaaatttctgccgtcgcatacctcgacaaaatgattgtaaatcagaaaaaaaagaacccagataaaaacctctcttatgaggatatctgctacctctatgtacgctcttcatacagagatatacctttggccggggaaaccctcgacctgcataaaaagatggtcgaaaaactaagatattgggtcaacctctctacgatagaaaaagcctatgccgccacagccctttatagatatggctttgtcgaagacgcaaaagacatcttgaagtccctgcggcaatatgccgtcagtcagccagccaaaggcatgtactggcccaacaatcgctctcattattactacaacaacagtgctgtacaagaacaatgtgccctattcaacgcattctccgaaatcgagcccgtaacctccgaactggatgccatgcggcaatggctgctctcccaaaaacaaaccaacgactggggagccgtaccctctacgctcgaagccatatacgctctgctcgaaggcggaacagactggcttgctcccgacgagaataaaacatcgatcgtttgggggggacaggaaatgaaaaacagtcccgaagaaccttttttgggactgacggaatacacattgtccggtaacgaaatctctgcggctgccgccaaagctgttatttccaccgatcatgaacaaccctcgtggggcgcaatgtactggcaatactacgacgatgtcaaaaacgtaacttccgcatcggtcgaagacctcgcgctctcacggcaaatcgtggtaagacaacaaggagtgcaatcggcgacctatgtaccgctcaaccgcgtcacgctcaaaacaggcgatcgcatagccatacggctcaccatctccgtcggacgagatatgcaattcgtatgcctcaccgattcgagagcggcttgtttcgaaccgacagaacaactttcgggatataaatgcagggaacgtatctgttattacgaagaagtaaaaaataccgaaactcggttctatttcgacttcttaccgaaagggacctatgttatctcctatgagctcgatgtcgaccgacccggagaatatacacaaggactatccacgatacaatgtctgtatgctccgcaaataattgcgagaacaccggcacaaacgatcataatcaaataatccttttgcttgttccgcgcagggctgtttcattctactgttgaaacagccctgtttttttaaagccgtctcaacgcctgaacacgcgatatgagacaaagtgtcgaaaagggacatggaaaccagtcgagaattagaagctattttaaatttattccgaaacagattgagacctatgttgaagctgattggagtccgagatatgtagtcaatagcgggttattgacaaaaatcaaggaattcaagatgcgagacaggggcgcaatatggccggaacatacctgcttgcaatgataatattatttctctataaatttaaaacagcttcttagtgggaatagtcttttaactcttgccgcaggtagggaggaaaaagaacattcgcagagacatttttattctcttcccctgccgtttcccgtagccttacgtggtatttcagtttccattatcggagatacttaaaactcctcccttgccgtgccccgtagcattgcggggggctgttttctctatcggagatatttaaactcctcacctgtgtggcgccagccatataggggaggtggcacgtagtgacggaggggttaaaaaatatctgcaacagaggaaacgtatcaaggcatcaacctctccccttgccgtgtcccgtagtattatggggtgttttgtcctgcaaaatataggggaggtgtccgcaaggacggaggggttagaaaataccggcaacggtagtgacagaattaaaccttacaagtcaaaaatcttatgccccctttccacccctccccataccgctaacgcagcacagaggaaaagagtaaaaaccagacagtgaaagggctatcaaaaatttacgaatattctataaatagaatataataactattttctgtaaaaatatatagaatattgagaaaaaagcgatacatttgcgacggaaagaaaggggttaatatgttaaaatataataaactatcgatttaatacactttatgaaatttacaaaatttgctacaagtagcttgatttccgggttactgttaggtcttttctcgtgtatcgataacgattatgacttaaacaaagacatcaatttggaaatcagtgtaggaggtaatctgagtttgcccatcggcaaaaccgacacgatacggctcagccgtatgattgaagaaggggacgttctccatgtcatcgacggaaaatacgtaattaacaaagcggataatatttccgaaaatatcgacgctatcgatcccgtcgtgatagacgacttcgctcccgactttaagccttatacaagacgtttcgaaacccagaccggtgaaatacccgatatacccggattggaagtcccggatatagaagtggaattcgaagcagatatacacacgacagagaacttcaacatcaacaccgaaataccgacagaggtaaaagcggtaaaaagtataaaagtcaccgataataacggacaaacacttcacacgacactcgacattacaatatcgggaatgcccgttttcttacctcgactttacttagtaggtgtcgaattgaaatttcctcaggtactcgatttcgacatagaagctagtaacgaaatcgttcgcgacggctcttccattttcatctccaagacagtcgaactaagtcaaggtagcggtaaaatatccattcccattaccgtctatggattctcaaatcccatagtagaaaacgggactttgattctgaccgacgaaattgcaatcaatggaaaaatttatgccgacaaacaaaccgtaggagccgacgatctcgaaaacacgacaatcaatatccaacccaatctcactttgccgactccgcaaatacgggtggataaagtcgcaggaaccatagtgcccaatgtagacataaatacatcggtatccctatccgacctacccgatttcctcaaagaagaaggaacagcattggaagtaaaagatctttctctcggcctctctgtacagaaccccatcgaagcgcctatatccacgaaattccgaatttcaccgttgaacgaaaacggagacgtggtaaatgacaacgtggtgagtctggcattaaaaatagccggaggacaaaaaagcgacttcacgatcaccaagaactctcccgaaattacatcgggctccctcacggccctgctccacacgattcccgacaagatcgacatagaagtaaccgaagtagaagtggaaagtgaaaacgacgaccaagccatctcattagggaaaaacgattacaacataaacatcgattacaacataaacgttccgttagaatttgaaaaccttcgaattttctataacgacacgatagaagacctcagcagcgacttggccgatatcaccgataaagtcaaacacctcgaaatctctgccgttgtcgacaacgccattcccgtggatctcacgctttctgtcgaacctcgcaacgaagccggggaaattatatcaggcattacgttacccgaatccgtaaaaatcgaagcggctccgaatggaaacggcacgatacaatccacagccgtaaaaatcaccatcaaagaagagcgagataaagcccttcaagaactcgacaaactatcgataaaaatcgaaggagtcaacagtgatggcaataacgatgtcaccctccgccccgaccaattcatcgttgtgcgcatgtcggcgaaacttcccgatggagcacaaatggatttagacgatttgtaatagattaaaaccagaaagcaatgaaacacaatataaaatacatactgagcgtatgcataggcatcgctttgacaatgggattgtcggctcaaacgctcaactcttcctatttcatggaaaagatgacgaaacgcaaccagcttaatccagccctgaaaacgcccaacggatacgtcagttttcctgcactcggcaatttctatttaggagtgaactccaatttaggacttgggacattcctctatccgagaggcaacgaattggtcacattcctccaccccagtgtccccgccgacgactttctcggcaaactcactcccaacaataccgtcgaactcgatttgggattagacatcatctcttttggattctgggcatggggtggacaaaacacgttcaacctcgccctcaaaagttattcgggagcatatatgcccaaagaaatattccaatttctcaaaaccggacaaaaagaaaccgggattacccgttacgacatgagtaacatcacggtttcgaccgacaattacgtggaactcgcattaggacacgctcgggacattaacgacaaattgggagttggagccaaagtaaaagtgctggtaggtgcggcacatgccgaagcaaggatagatcgcatggatatatccatgtcccaagacgaatggttcatcaaacaagccggacatatacaagcctcttccctcctgaaattagagaccgatcccgagaccggagaaatcaccgactacgacaccggagatttcggtgtggcaggcttcggactgggattcgatttaggggcgacttacgagctgatcgataacctcaccttatctgcggcccttaccgacatcggattcatgcaatggaacaacctcactcgtggagaaaccgatcccaccaaagaattccgatacacaggattcgacaatatcggagccgaagacgacgaagaaggaaacaacccgttcgacgataaagccgacgagttaggagacgatttggaagcgctggcaaaattctataaatccgatagccaatccgttaccaattcgttacgcacgaccatgcgcattggcgcagaatatagcattctggacaatcacatctctttcggactactttccacgactcgcttcggcggacatcgcacctatgccgaaggtatggccgccgtgaacttccgcccgttatcggcgctccacatcaccctcaacggctccgtttccaatatgggtagctccgtgggagccattctcaacgtatgcgcacccggcttcaacctgtttttcggcacagactattttgccaccaaatattccaaacagttcattcccatcaatcatgcccgagccaatttctgtttcggcataaatttcacattcgggaaaaaacacgaaatataaaaacgtaaaacacaaccgtttgaaaaaatttcaaacggctgtccacaacaagacaaccgctcatgcggagcagcgaagcgagatcgtccataaaacttttagggcggcctcgcttttttcataacaccgcaacaggcccaccacctcgacacaataagaaatcagtaagaattatctttacttccaatccctcaataacgaaaacagaatgagacctccccctctcccacagctcatcacaaatgagataaggaggggagagaattgaaagtggtacttctcgtttcggcataaagatagattttcacttctccccctgccgtaccccgcagcattacggggtgtcacatatagaatcggagcagaagcgaaagggaaatacatctcaccctcctcccctatgttttgccacacaatatataggtgtggagtacccgcaaggcaagagggtaaaccctacaatcacaactcctaaatacacaatactctcccttaaaagttctatatataattattgttaacaacatatattttcataataaaaaacacaataaatcaaaaataaatcaattatatttacatcgtttctaaacgaaataacctcattggaataaactaaaatttaatacttaatcgaaaatatcatgaaaacaaatcgcctcttttttgtaatagcagtatacagtttttctttctgcgtaatgggacaaatgaaaatccaaaacgatggacaaatttcaataggtggatatggttcaaattctatgggctcctctactttgaaccttttccccaaaaacgaaaaagcccctgcccgtatttcattttataattcggtaagtaaccctgtaaatgatgtttatatcggacgatatataacttcggaaaatccatcgttattccatttatatggccgtgaaggattctgcttttcaagttccgagggagacgtagttctctatgacaatgccaattatggttcgatgatacaattcttaaatgttgatgttatcggttatttttattcaccatctgacagtcgtttcaaaaaaaacatacaaccgctaaacaacacactctcgggattactccgactctcgggaatcagttatcagttgaacaaggaaactcctgccggaacaaacaacataaaaataaacaaaaaagaaaatgcccgtacccatttcggattcttggcacaagaggtaaaagaggtttatccagaattagtgcgtaccgattcagcaggatacatgtatgtcgactatataggcatgattccactgattgttaactccttaaatgaaatacaggcaaaagtcgactcgcaagaaactgtcatcaccgaattgcaaaaagatctggcagccttgcgggacggaacacccataggcggcgcactccgcaagtccgagcgacgcaataccgcagtcgagtcggaaagtgctattgttcccgccctctatcagaacaatcccaatccgttcagtgcaaccaccgtcatacgttttgccctaccctacgagacacaacaggccgatctatatatctacaatctgcaaggcgagcagatacgccgcatggaaatcgccgaccgaggtgaaggaaaagtaaccttgcaaggctcggagctctcggcaggaatgtacatctactccctcgtggccgatgggaaagagatagacagtaaacgtatgatattgaccaaatagaggcaacactcatgaaaccgataatatcacgattgaggcatacggtcgtcgccctgttgtttgccctctccatctcggcagccaatgcgcaaatcagctatacggcgacattcgaccaacaccttttgacaaccgacacggttagtgaaaatggcgactcttaccttcgactcagatatcccgacttgtggacacagtccgcagccggtacgcccgagctgcctgtacactatttgcgattttccgttccttgcgatgctaccgatttcacggtttccgttacgggagagaccacaactgcgactcggtatacgctaccggtttatccgacccagccgcctattccctccgacaggaatacaagcgagcaactgttcgtttcccccgacagcacggtatatagcaacaaccgatattggccggctgttccggtacaagtggtagacgaaggatttctcgacggtgacaaccacatcgtcaccgttgctgtatgcccgataagttacgctccgaccgatggtgaaatcctctttcgtaattccgtgaccgttcgtctcgattattcggtgaaaaacgcaggttccgaaaacccatcgcgccttcgggcgatatcccgcagagcaaccggcagaaataacgttcgatggggaagagaggaggcgaaacggatagtcgtcaaccccgctcaggtcgatgggttcgcccctgcgacagcgacccgttcagcctcgtcccggacagttactactttacccgacttcgaatataccgttgtgacaaatcgggaattagctccggctttcgatcgcctcatcgggtggaaacggcaaaaaggatactcggcaggagtagtttgtatcgaggatatcttagcgtgtcccgattttcaagggggcgatttggtctctaacatcgacgatgatgccggtaaactgcgagcctatctgaaatatacctacgactccggctctctccgctacgccttgttagcgggcgattataccgtattgcccattcgatatggaacgggaagacggagcataacaataaaggattcacaaaatcaagattctagtatttatgttgattggcctattccttctgatttgtattttagtgattttaatggaaattggaatgtcgatggagattctttgtatggggaatttgaaagtagtgaaatgtatactatggactatgctccggagatttttgtgggtagattgttatgcaccaatcggcaggagattgcaaactataccgaaaaactgatacggtatgagcgcaaccccggcaatggcgattacagttatctgcaaaaggctttttatcatcaatgtgatgaattacaaggtatacatgaagcggattctgtatcttctaattttagcccgattttcccgcaatatactatttttgaagaaaaaccttcatataatacggaaaatcctacatttccgagcggttcggaagtaataacggaaatgaatgagagatacggttttttcagttggcatggacacggtaatcccggcggtatcggtacaaagtctcataaaaaccatgaatatccttattgggggattcttgcagtacaaggggtaacttgtcatcatgtttttgaagaaagcaatggattaaataatttaacgaatcaagactatccggccatagcctactcaacagcctgcgatgtgacaccattcgacatatatgaacaatataatgtaacatataacataggcagttcctttacggtagccggcttatatggaggtcctgcctttttgggtaatactcgaagcggttggattggttcctctgtaagattagaaaaaaaattcgtagaacaaataaaagaaggtaataatcaaataggtgtagcggaggctttttcaaaagtaagttttgcgtataacaaatattcacgttggtgtagtttgacccacagtttaatcggctgtcccgaattcgagatgtggaccgatatcccttcggtatatgatgatatctcggttgcacgttcgaacagttcgattacagtggccggtaacggactgaacggcagtaaagtggcaataacctctggaataaacggattacccgaaataaaaactgtgacgggagcaagcgtaaccttcaacgaagtctctcccaacagtgtagtgacggtttacaagcacaatgccataccatacattgccccgctatacctgcaaaacgacacgctacgttcttcacaatatttacacgtgaacaacgtccacatcggccaagcggtagatacgaaccggacggagggagacgttgttttaaaatcgggaactctcacgttggaatccggtggagatgtatggatagacgaaggggtaatcatagagaacggtgcgacattgataatcgagtgtaaaggaaatgtaacaatctccggtggaacagtggagcgcggtggctcgttgcgaatcgatgccgggggagagataatgatacaaaaaggcttcgaagcaaaaattggggcaaatgtagaatttaaataatatagggaggaaccgaaatatgaaaagactattattgttgattgccgtgtcgatagtatggagcggtagcgtcttgcaagcacaggaatacgagtatgtccctttggtacgggagggaatagagtgggggtataaaaatggtgagatttatcggttcattggcgaggaaattataaatggtaaagtatataagcaactggggaatagtagccgtgattatccggatagttataaaattgcaggttatgcccgggaagagaataaggttgtttatcgcttgtactcgaaagatgccgaagaagttcccatttatgattttaatgtaaaacaagtaggcgacattatgcaggcatggcatacagaaccggggtatttcggcatgaaagtagaaagcctcgattctattttagtaaacgggaaatacaggaaaatgataaaactggaaaaccaaagaggagaatgtatcgagggaatcggaagtaccgaaaccggatataacattttgtatccgttctatcaaatcacttcggagtttgacgaaaagaccaagaataaactcgaatacgtaaaaaatactgccaccggtaaaaacgaatggcaaagaccgaatgataatttagatgataaatatgaatatgtccctttggttcgtgaaggggtggaatggggatacaccggcgatctgggcgactaccgctgtcagataaaaggcgacacgataatcgatggaacgacatataaaaaattttataggtacacgacctgcggattgcaaaagaataccccctgctacgtggtagtaagggaaaatgacaaaaaagtgtactatcgggaaataaccggcgataaccgtgaagaacgattaatctatgacttttctcttgaaaaaggagatatgtctatcttatatagccgttcggctttggattatatgcagatagatgtccgttatgtagatacaatacaagtgggttcgacctatcgtaaaaggttagaatatcttattcatgacgtaatagaagggatcggcggtttgaaaaatgattggctggtcgccgccttcaccatagcgccatgtgttccagattgcaatgtctggatatatttgtcctatgtgaaaaatcttgtcaccggcgaatatgagtacgggaacaagggggcttgtggcgacacctatgcatatgacccttacgtgaaagattgcaatttcggattttatcaccacgacccggaggaccgttacatctgggacatcgacgtatttgcacattactacataacaggagaaaaagctgtaaacggaaaaatctataaacagttcgtcgaatcgaaaagttgcgactacgcttccggcacggagatcgctctcattcgcgaagaggacaaaaaagtctacctcttggacggagaaaaagagtggctatggtatgacttcactttggagaaaggcgatacaattaccattgaatccgcatcgccccttaacccgtcgggcgagaaactaaaaataccggtcgtgaataccgacacatttgagataggcggtaaattacgcaaacgcatatatttgagaggatatgatacatggatagagggattgggaacggaaaaccgtcttcccctgcactcgttcgagccaagttgcggaatggactgcggcgataagctatactaccaacgaattggcgacaaaatctcttacttggataactattttatacatgacttgttggagccttgcacgtcgtcggtcttagatacacaaatcgaagccttgcgtatcgcccgtacccccgatgccctgattgtgaccttgccgggcacaggctatcgattggccgagctcaccgagatgaccggccgattggcgtggtgtgcctacttggacagcgaagcggaaggagtaacgattcccaccgccaccctatcgcccggagcgtatatcgtcaccctatcgaacgaccggggcggacgcatcgtacagaaagtgatgataaaataaaggataaaactaacgggaaggaaccgaaatatgaaaagactattgctattgattgccgtgtcgatagtatggagcggtagcgtcttgcaagcacaggaatacgtcccctttgtacacaagggggcttgtggcgacacctatgcatatgacccttacgtgaaagattgtgactttggttattataattataactggggcagtgtttcgggatttacccattataggatacaaggcgaaacgaacatgaacgggaagacttacaaaggtctgtattccctcaccggagattcttctgcttcttcggaacagaccctcatagcttttgtgcgggaagaaaataaaaaagtctactttatggacggcgagaaagaatggccgtggtatgatttcactttggagaaaggcgatacatggacaatcgaggccgagtctccgctctctcggcatggggaggaaatagaagtcgtcgtttcgaatgtagatacgataaccataggaggaaaatctcggaaacgcatatcgtttcaaggctattattcgtgggtggaaggattaggagatatggaaagcctgccttttcataccttttatggcatacctacctgcccctgtggagatgatatgcattactatcgagtgaacggagactttgtttttaaggcatctacttattggggactccccatagtagacccgtttatagacggcaattacattccctttatcaaagaagccgattggacctattacgatgcagccccaagcgggacaacgatatttccccgatatcatttggctgcaaatgttttcaattccgaaggcgtttatatgaacgataacgtctattactggctgtatcgttacgaaggttgcgatttcgatgaatccgtttcacgacaaaagttggtactggtgcgggaggaaaaccaaaaagtctacgtgctcgatagtatagatgggaaatatgtagataaactcttgtatgattttacgctggaagtaggcgacaccctgcgcatggacgaagggtcgtattatcaccgacccgaagatggcgatgactggaatgcaataccgggtcggaaacggtgtggcgaccgcatgtaccggaaaaacgacccttatggagaactcgatccctattcgggatttgaagtaataggtatagactcgatagtcgtggacgggcaaaaacgaaaggctatcacttggaacaacggcaacacatgggtagtcggattgggtgaaatcaatgaatatcctttggctcaattctatatggactatacgacatgtataacacctccgttttacctattgtatcagaaagtaaatggagaatattcctacgaagtgttggcagaacatgattttacgcccgatccatgtgtaagcggtatcgtcgaaaataaatcttcttctctgcgtatcgcccatacctccgatgccctgattgtgaccttgccgggcacaggctatcgattggccgagctcaccgagatgaccggccgcttggcgtggtgcgcctacttggacggcgaggcgggagaagtaacgattcccaccgccaccctttcgcccggagcgtatatcgtcaccctatcgaacgaccggggcgaacgcattgtacagaaagtgatgatacagtaaactgaataaaaggtattgaagggattcggcaagaaatcaaaggagattagcgataaagtttagcgacgaatttcttgtccgacaaccacatttcagactcttcggtaaggggttgaaagcactgtttaatagattcttaataaaatctaacccctccgtcacgtcgtgccacctcccctatattttgcgttgcaaaacacaggggaggagtgtgtgaatgccctacaataccgcagggtataggtgagggagttaaagggcattctccttttgaggtagaaggatagattttacacttcttccccacagcaccacgaggtgttgcacataaatcgaagcaggagcaaaaagcaaagacaattcaatagaaaggcattaacctcctcctctgcgcacgtatgtgcgataggggaggtggcacgaagtgacggaggggttaaaaaacagaagaatgatagtgtcaaaagatttctacactcctcccctaccgtgtcccgcagcattacggggtgtcgtaaagcgatataagagtatcctctctcgaagtcatgcaaaaaaataccgcccgatatacgttcatatcgagcggcattctatattcaaatagatcgaattctatttcaaagcgtcggcaagagcagcattagttttatgaacggcagcagcactcttggcaaaagcctctttctcagcagcgttcaatttcaactcaaccactttttcaataccgtttttacccaatacacaaggtacgcctatgcagaggtctttctccccgtactcgccttccagcaaagcgctgcaaggaaccatacgtttctggtcgcccaatacagcctctaccacagaagcggcagcagcacccggagcataccatgccgacgttcccagcaatccggtcaatgtagcgccacccaccatcgtgtcggcagcaactttctgcaaagcctcttcgctcaggaattcggtaacgggaatacccttgtaagtagcgaaacgagtaacaggaatcatagtcgtatcgccgtgaccaccgattacgaaaccttctacctccgacagattggcattcaacgcttggctcagataatatttgaaacgagagctatccaaagcaccacccataccgataatacggtttttgggaagacctgatactttatgaatcaaataagtcatcgtatccatcgggttacttacacacaagataacagcattgggagaatatttcaaaacattctctacgaccgacttcacaatgccggcattcactccgatcaactcctcgcgagtcatacccggtttacggggaatacccgaagtgataacaaccatatccgaattggcggtagcctcatagttgttggtcacacctttgatacgcgatgcgaaacctgccgttacagcagcctgcatcatatccatagccttgccttccgatacaccttctttaatatcgagcaaaacgacttcgtctgcaatttctctgaatgctaacacgtttgcacaagtagcgccaacgtttccagctccgataaccgatacttttgacataattgtttgattttaaaattaatatatgataatacctttcttgttctctatgtttcgcaaatttacaactatttccatattatggaaaaatttcctcaattaaaattgtataaactttgcatattcttttaagcaaaatttaaaaacagctatacatctaatagccaacaaattaacaaatccacatagattattcttgcaaatcgcccttaccttcgcgcaataccacaggctcgtctcccgtacaatcgaccgtagtcgacggtatcgtaccgccctcgcctccgtcgataatcaaatcggcgaccgattcataacgttcagctatcaactccggatccgtcccatattcaggctcctcatcgtcaacagacaccgacgtcgtcaataacggattgcccaacgcctcgaccaacgccaacgtaatggcatggtcgggaatacgcacccccaccgtcttgcggtttttataaatcttaggcagggacgagctcgtaggcaatataaaagtgaaagcccccggcaaattacgtttcaacagcttgaaatacaaattattcagtttggcatattcactcacccaactcaattcccgacaaataatcgacagattgactttttgaggattgattcccttaatccggcaaatccgctccacagcacgcacgttcaaagcatcgcagcccaacgcataaatcgtatcggtaggataaatcacaatacccccttcgcgcaacacctccaccgcttttcctatctccgtagcgttgggattctcctcgtatattttcaatcgcctcatcgcacaagtttaagtgtcgctaagataacgaacttttcatatttcaacaatatttaaagaagaatataataagaagctgttttaaatttattgagaaataatattatcatttcaagcaggtatgttccggccatattgagctcctgtctcgcatcttgaatcnnnnnnnnnnnnnnnnnnnnnnnnnnnnnnnnnnnnnnnnnnnnnnnnnnnnnnnnnnnnnnnnnnnnnnnnnnnnnnnnnnnnnnnnnnnnnnnnnnnnnnnnnnnnnnnnnnnnnnnnnnnnnnnnnnnnnnnnnnnnnnnnnnaaaacaaaaagagagcatgataaaaaatcattgcccccttttgtacatgcaatgagacattagttggttattattaagcatattccccctctcccagccgtgtcccgtattacagggcgtcgcacataaaatcgaagcaaggatagaaagcaaagacaattcaatagaaagacattaacctcctcctctgcgcacgtatgtgcgatagggcagatatccgaagggcagaggggttaaaaaacagaagaatgatagtgtcaaaagattccttcggacactcctcctatatttccttacagggacaccgagggagaagaggatcaaccctgtcactatcgctgccggtattttctaacccctccggcactacgtgccacctcccctatattttgcacagcaaaacacagaggaggagtgtgtgaaagctctacaataccgcagggtataaatgagggagttaaagggcattctccatttggggtagaaagatagattttacacttctccccagccgtaccccgtagcatcacgagatgttgcactaaaatcgaagcaggagcaaaaagcaaagacaattcaatagaaaggcattaacctcctcctctgcgcacgtatgtgcgatagggcagatatccgaagggcagaggggttaaaaaacagaagaatgatagtgtcaaaagattccttcggacactcctcccctaccgtaccccacagcatcacgagatgttgcactaaaatcgaagcaggagcaaagacaattcaatagaaagacattaacacttctcccctgtgttgcggagcaatataggggagacacctcagaaactgttgtttctgaggagaggggttgaataaaaacgggaaaaagggattccgtctttatcgggcatgaagcccgattcatcactgcaccaaccgaagcgtataattcaatccactctgcggcttctcaaatttatcgttcaacaaagtaagacttgttccctcttttgacaaaagaaaattaaaaacagtgccatcgtcggcaaccagttgccacaccacggcatccttgtcatcggccgaaccgcgttgagtgaaccgcctaccggtataagtcacggtctcgtccttcccgttttcagcctccaaataagtcattgcaagcacgaatgtcccgtccccgctatactcgcgattacgcaccgtcagagtgtaacgtatacccggagtatcggctgccggcagtaccccctcataagtccgctcctgccaatcgcccaacgacgagtcggcagctgcactatcttcccgatatatgacctcaccccgctgttcgatcgtccataaaccatttatgaaacgcacattcttcgtatcgtcgtcctccacattccaagcaaaaccgcccgaaggcaacgtccgccgctccaaaatctcattcggttgcccgtcggagaaaaacaattccacttgggacgaatcgggagaaaagacgatatagaccgaacggttatcccctcgaaccgactccgtgcggatacccttctcgaacacccgtatacaatcctgcgacacctcactccacacatatccggcagagcctatgcaaccatgctcgtctcggtcgccaccgagtaacgctctttgcggataagacaccattttcaaagcccccattcccttttcataccttccccggtaagtaatctcggccgtatcgcccagcagcaatccgtcgaccccgcttctatcggtatcgaccgtactgaacgacaacgtgtcattgtcgtcggtaacaatagtaaccgtattcatggtagcatcacatacaattcccctagcttcaccataatccgacttggacgaacaaccgcacaataaccccacgattgcaaaagacaataataatgttctcatatcttcaaaatttaattttctttattcgatttcctacctcaaaacccgacaagggaaaaatagaaacaagacaaaaccgatattcctattcctcacatcgagtcatatcctatattcgaaaaatcaaatatacacaaatatcttccattccatacaaaccgggacattaaaatccccatctatccaaaaagaacagctccctgcccgttttagtttaatagatgttcaagctcccaccaccccaaaagatatatattgaagagttaagatattcgttaaaagtatttcccctcctcctctgccgtgtcccgtaaccttacggggtgttttgctatgcaaaatatagggaaggtggcacgtagtgacggaggggttaagatattaattaggtgatttcaagaagcgatatcgaatacctttaatctttcttccccgtgttgcgaagcaatataagaaaactaccgaagaaacaaaggggagagtatataaaagaagaagccccactaattatcgaccgattcattttacaccgccgtaataaacttccgttccgtctgcaaaaaagccgttacaagttttttgcaacggctttccagcggagtaagggggattcgaacccccgatacgcttttgacgtatacacgctttccaggcgtgcctcttcaaccactcgagcatcactccctcgggtcgatcccgtaaaaacggtggcaaatataatacatttttcgggttcgacgaaagtttttacaaaaatagtatctcatttttacgacagccgcccgaattaccccttgataatatttacagaaagtaccttatcgtccacatgaacatacaatgtgtacacccccggcatcaatcccgacataggaaccagcacagaatactctccctcatcttcttcacgactcggtgtccgtctcagacaaattcccgcactactgtgcaaagtgaaccacaccgaagccgaacgagtaagtttatattttattgtcaagtcactctccaccggattgggcagatattccgcctcggtaaaaacattctcgatcggtaggatctcctcctcaatcgattcatcgtcggcactacggtcactctccccactcagataatcgggcggatagtaaaacgatacagccgagagtatcgtatcggcctgtgtaccatacagcgtggaagtctcgctctcgaacaccggataacgattctgcggcacataccaagcatacgtatccacactcactgacaagctgtcttcacatatcctcacatatcggcgggcggtatgtacccgcagggcgtttccgaaagtctctcccggtaaactcaattcaccttcggcatcggctgtgacagtcgtcgttccctcgacgaaaagaggaatacgctgaccataccgtcctgctccttcgaaacgactcgtcagagaatcgccataagcgaaaggataacgcaacaaaagttcgggacgagcataatcgatatagaaagtcgcattctcatgtcccacacaccacaggctatcacttccttgtcggtaataataacggttacgcccctcgcgaccacaaagaatatccatatgggaactgtccggaataaaatattccacgggaagttcctccgaaaggatttgcattcctcggaaatcccaccggcatttcgttccggccctgcccggttcttggtactcgaccagccatttgacgaatgcctccccggcttccagccggttgctgtcggctgtcaattctattgccgacaaaacttgtacagcagcaataccggccgtacataataaaacacgtatattcataacatttctctttatccgtttcatcgttctattcattccgataatggtacttatacaatgtcgtagtcttctctccctctttcacacgcaccaatcgccccgcatcatcatactcataataagtcgtatgcccccgaggatcggtcgaagaggtaattcccaccagcggctcatacgtataaacggttacttgtgccgacggcagttccgtacgcaatcgggccagcaacattccgtctggaatttcagccgcagcgaaagcctcggcatcccctatgatgctctctacttgctcccaagaggcattcttgatttccgccaccgggtattgataactatatccccacaagtaaatggtagttaaatcatcgctcgttatacacaatggatttccatgagaatcgtatctactgtatttcgacttcaaataaaatggattgctctcaaacgatatcataaactcactcggtttaaacactttcggataaaattgcttataacttaacttttgagtggacaacaatacattctcgaattttttcttgtattcctgccgttctatgataggagagactatgttattttttatcattcccttatatgggtcttcatttttataagcatcggaaaagacatactcattctttatctccaacatttcaccatcactggtcgtttgaacaatactaatcggctttaaataaatagaatcatacgcataactttcattctttacaaaattaccgttatctgtccacaacgagtctatcgtctccgataaaacgggagtagaggtatctatcaaatatcgatcttgaaggaaaaacggaaaactcctcgaatgttcaaaacgtccataaataagatccaaacgctcgaataaatcaggagtcagaattaaatcgtctaaatcggttgtacttaaagaacctatacggacaaaagacggtggataaaacgttgtttttgttacgcttaaatttctcaatttggtgcgacttaataattcatattcatttcttattatcctttctgacacccaatttcctatttcgtcctgtctttgaaccaacgtctctatcaaattccccgatttccatcttctccatgtatgcaaccggggaaaagtcaaatcattattaggccgagacctagtatacaagtttcggtgttcttcaaatcgatatacattcctaccgatattttgttcgttcgtaccgatatattctataacttcgggatatctgatttggtttcctgttcccaaagttaaagctccgttcatatcagatgaatagaatctctttctaaatgaaaattcgtgatagcgaataaacccttgattttctgtcctcatttgaaaaagaatgccgtctgcctcatgaatataattttctgcactatcgggcatcaattccaatacacccggagagtattcataacttctgctagttttatttccttttccatcatcattgataattcgatgaatccgtaatcctcctcctggtttattatcttccccataacgattcaactgatattcaaactccgaaaaaccaccggtaggataaactattttttctaaaatgtatgcttgggcaaaatattcagaaggagttctatcgcagaacccgatggtataattatataacagacctttttccaacacaccccatgctccattttttacttggttccgtttaaatgtcaaataaaaattaggaaccaaagacgtattgtcgttacaaccattataatatccccaataatccaatgcattggtatgttccacttggggaaatcgtacatcattatattcaaacaaatatcgagaatcgcacactcgtcgagaatctaaaaactcaacagaatttaatgcattccaccgccccgattcgtcaaaagcggttgtgttgaaacgaacacttcttaataactcgtttctattatcgaaaatatctatactcgaaactcgctctcctccatctatcgaattaaatacaattttccccaatggaaaaataatctccgatattgtttttatattatacaataactctctatatccgttatataccaaacattctatactagacccagcataactatctccaaaataagtatgcgttccctgcacatcttctataatctcatctccctgacgaccatcttttatttccacaaaatgattgggaacccaaattttatacgtaaaactcccatttcgcgatgcatctctgtatttaaaaacaatactatcttttccgtggctcggctttattccggtcaaaagccaactcgactcgaaattgctacccgtatattccacagccttcgattgcccgtctaaggatttaccaaatctatattgaactcctttatcgtcataaatatcgatcttttgaataagatgaccggcccactcgggttctatttttaacgaattatgcgggaatttaattacttcgtcaaatctgcccacaacaaatttcccgacgttatcattaaaccgataggaaaaaatatcatattccgagtcaagtaccgtattcaccaactgcccgcaagccaatcgttgtaatattttgaaatcctcttcatctgtttctgtaagatagcccgcctccaaagaatctacattaaacataggaacccgcttgtctggtttccccataattgttcgtgacaccaatcctcccacatctataatccaccccgtagcgacattcgacaactgagtttcataaaatttcacacctgcatgatggtatcgcaatgttatcggcacctctattccctccatctttacagtatacaatggtatggatatatcagcaattcctgtattataattaaccggataatctccataaatatgaaatgcggcagccctcggagatggaggaataatgggtctatcctccggcaaactttgttgattttggccgattatacagaaaaatgggaatacgactagcacaattataatcctaatatttttcatattcaattatactaaattgtgattatacacttctacatgttatcctttaatatcaggcttccgcaaagacgcttcgccctcggtgatcgatccttgttcctctattattcgctttcgcagttttcctttttagtcctgtaataacacgacatttctcttttcctataatcatcttcttgctttgaaactggttttcatctgattttttaattgtaaggggtgtctaattttactgttcagatagttttctaatattgtatgcccatatttaaatcaatagacatagttttattggtcataaatgaacgaaatttaccaaaacgtccgttgtcgtcctttattacaaaataagacaatcgtccgaatgtaaaattcataccgtttgaactttcagtaatataacctacactatattttgacaagtcaaaaagaagcaatctctttattttttccatttttcaaaataaaataacatatcggtattgtaacaaactcagaaaataaagcaggcaaattaataaattctaatgccattatatcaatatctatattccaagattgccaaataataagtgacaataataccgaaatacaaaactgaactaacaacaataatgcgattttatatttgcgatttacctcttttcgtaaaacaaaaaacaatacgatacagccaactatatagattatagagcctaaaaaaagttggagtgatatcagctcccaaattgaaatatattgttcgtccatattatttattattgttcccattctattttttctgtctttgggtcaggcttgaaattatcttgatactcctttaccatactattaggtctgggatcaatgattgtttaatagataaataatgaaacaaaatacaaaacaagcgaaccaataacgtaggcaaatactaaccagcctttcaattggctattcttttcatctttatatttttctgctaactctttgtatctattttcattaagaacaaagaaactcaacacgaaaagcaaaatccaaattaaataaactatctgtatgctatatctaattcctaatatatagcaaaataagccaattaaaaacagtatattggaggcaaaggcaaggaataatgaaaatttccctgaaatataatagttattgttttcgccccatgatttataaaatttagaagctctataaaatacgtaataaaataaatctttcattttcaatttatttgaatggttgataaccaggtagtccgggatttattcccatttctatttgaggtattaaaacaccattaacccacttgtaatgcagttgctttcctccaaatgaccaatacaaagaagcacctgttccaataacagggacaaagctcattccacccataaaaacgtctaatccgtgttcaagttttccttcaaatgtagatgcttctctaaattgataggcagaagcaagcacgccaagacctcctaacaattttccaaaatgtcctacccctttcccaatttttgaaattgaggatggagttacccattgatttcctttccagccattttcataaaatttaaaatcaagagctcctttgctgtttgttaatcgaaaagttgcattgcttccttcggcatatcctcctaatgagcctgccacagcagaaccctttgacagaagatttcctaatgtagaatttaaagcatttgcatttttttcgtcagcaagattatatgaactgctacttaaataaagctctcctttgctatttgtgtgttgcgtaaataacgttgcattgtctccattaattgataaataattttgtccaatattattccaagtatttccgttatcgtctttgtaaattttatcttgtgatttacgccacatagtttgagaattcccatccttatccgtatattcataccagtcccttccgtccgggtctacataattcaccggattattattacaataggcatagggcgagatagagtaatatttctcgcaaagttcattgaaggaattgaagaagcaagtgtagtacagtaaaataagagagaaagaagtcaattcggtcaggtaacgcttcgaaggtataataaagaataaagaagatacaacgaagagtttgatcctggctcaggatgaacgctagcgacaggcctaacacatgcaagtcgaggggcagcgaagaggtagcaatacctttgtcggcgaccggcgcacgggtgagtaacacgtatgcaatccacctgtaacagggggataacccggagaaatccggactaataccccataatatgggcgctccgcatggagagcccattaaagagagcaattttggttacagacgagcatgcgctccattagccagttggcggggtaacggcccaccaaagcgacgatggataggggttctgagaggaaggtcccccacattggaactgagacacggtccaaactcctacgggaggcagcagtgaggaatattggtcaatggtcggcagactgaaccagccaagtcgcgtgagggaagacggccctacgggttgtaaacctcttttgtcggagagtaaagtacgctacgtgtagtgtattgcaagtatccgaagaaaaagcatcggctaactccgtgccagcagccgcggtaatacggaggatgcaagcgttatccggatttattgggtttaaagggtgcgtaggcggcacgccaagtcagcggtgaaatttccgggctcaacccggagtgtgccgttgaaactggcgagctagagtacacaagaggcaggcggaatgcgtggtgtagcggtgaaatgcatagatatcacgcagaaccccgattgcgaaggcagcctgctagggtgaaacagacgctgaggcacgaaagcgtgggtatcgaacaggattagataccctggtagtccacgcagtaaacgatgaatactaactgtttgcgatacaatgtaagcggtacagcgaaagcgttaagtattccacctggggagtacgccggcaacggtgaaactcaaaggaattgacgggggcccgcacaagcggaggaacatgtggtttaattcgatgatacgcgaggaaccttacccgggctcaaacgcagggggaatatatatgaaagtatatagctagcaatagtcacctgcgaggtgctgcatggttgtcgtcagctcgtgccgtgaggtgtcggcttaagtgccataacgagcgcaacccctatcgacagttactaacgggtcaagccgaggactctgtcgagactgccggcgcaagccgcgaggaaggtggggatgacgtcaaatcagcacggcccttacgtccggggcgacacacgtgttacaatggcaggtacagaaggcagccagtcagcaatgacgcgcgaatcccgaaaacctgtctcagttcggattggagtctgcaacccgactccatgaagctggattcgctagtaatcgcgcatcagccatggcgcggtgaatacgttcccgggccttgtacacaccgcccgtcaagccatggaagccgggagtacctgaagcatgcaaccgcaaggagcgtacgaaggtaataccggtaactggggctaagtcgtaacaaggtagccgtaccggaaggtgcggctggaacacctcctttctggagaagcaaaacctggaacaagactggaaaagaccaagctctctcttggtactacacgcttcattcaatataaaaagaaggaaaacaacccgccgcaggcacgatttgaagaatagtcctatagctcagtaggttagagcgctacactgataatgtagaggtcggcagttcaaatctgcctgggactaccaggccggaggtcaggtagtaaaaggggggattagctcagctggctagagcacctgctttgcaagcagggggtcaacggttcgaatccgttattctccacgaaagatccttgacatgatggaaaaagaagagtaaacgagcaaagcaaacccatatcaacccctaacgtcgccggctccaaagagagccggaagacgcggaagaaagtaaacaagggcgcatggaggatgcctaggctctcggaggcgaagaaggacgtgataagctgcgaaaagttacggtaaggcgcaaatagccctagacccgtaaatatccgaatggggcaacccggccagcaatggtcataccgccaagcggtaagccaacgcggggaactgaaacatctaagtacccgcaggaaaagaaaataacaatgattccgccagtagtggcgagcgaacgcggaacagcccaaaccactcgtgttacggcacgagtggggtagaaggatccacgatacggcaagaaataagttagcagaatacgatggaaatcgtagccaaagacggtgacagcccagtacgcgaaaaccgacagaagcccagtggacacctgagtaacccaggacacgagaaatccggggcgaatcagcggggcccatcccgtaaggctaaatactcccgagagaccgatagcgaaccagtactgtgaaggaaaggtgaaaagaacctcgaacagaggagtgaaacagaccctgaaaccatgcgcctacaagcggtcggagcatgttaaaatgtgacggcgtgccttttgcataatgaacctacgagttactctcgctggcaaggttaagcgattcagttgcgcagccgaagcgaaagcaagtccgaacaaggcgtacagtcagcgggagtagacgcgaaaccaagtgatctacccttggtcaggttgaaggttgggtaacaccaactggaggaccgcaccgataagcgttgaaaagcttacggatgaactgagggtaggagtgaaaggccaatcaaacttggagatagctcgtactccccgaaatgcatttaggtgcagcctcgaagtaaagtgatagaggtagagcgactgataagatgcgagggcttcaccgcctatcaagtcttgacaaactccgaatactatcacttgatctttgggagtgagggcatgggtgctaaggtccatgtccgaaagaggaacaactcagaccaccagctaaggtcccgaaataagggctaagttgaataaacgaagtaaaactgcaaagacagctaggatgttggcttggaagcagccattcatttaaagagtgcgtaacagctcactagtcgaggagttttgcatggataataatcgggcataagccctttaccgaagctgtggatgtcgtaagacatggtaggggagcattccggcggcgacgaaggccgtcctcgaggacgactggagctttcggaaaagcaaatgtaggtataagtaacgataaagggggcgtgaaaccccctcgccataagactaaggattcctgatcaacgctaatcggatcagggtaagtcgggccctaaggcgcagccgaacggcgtagccgatggaagaaacggtaaagattccgttactggatataggagcgatgtggagacggagaagtgacacacccgcctgccgacggaagcgcaggttaaaggaagtaggtaaacgccgggtaggcaaatccgcctggcgtgccgaaactgacagtatcgagagcccccgggcaatcgaatagcggtggtaatcaggctcccaagaaaatccgctaagcatattctatatccacccgtaccccaaacggacacacgtagtcgggtagaatataccaaggcgctcgaaagactcacggttaaggaactaggcaaattgaccctgtaacctcgggaaaaagggtccccagtaagatggggcgcagagaataggtccaggcaactgtttaacaaaaacacagggctgtgcgaaatttcaagatgaagtatacagcctgacacctgcccggtgccggaaggttaagaggagagctaatcgcaagagaaggcttgaattgaagccccggtaaacggcggccgtaactataacggtcctaaggtagcgaaattccttgtcgggtaagttccgacctgcacgaatggtgtaatgatctggacactgtctcaaccgtgacttcggtgaaattgtagtatcggtgaagatgccgattacccgcaacgggacgaaaagaccccgtgaacctttactgcaacttagcattgcgtttgggcatttgatgtgtaggatagtccggaggctacgagtcggcgacgccagtcgtcgaggagccgctgttgaaatacggaccttcgaatgtttgagcgctaactcgcaggagcgaggacactgtttggtgggtagtttgactggggtggtcgcctccaaaagcgtaacggaggcttctaaaggtaccctcagaccgattggtaaccggtcggagagtgtaatggcacaagggtgcttgactgagagacccacaagtcgatcaggtaggaaactagagcatagtgatccggtggttccgtatggaagggccatcgctcaaaggataaaaggtactccggggataacaggctgatccctcccaagagctcatatcgacggagtggtttggcacctcgatgtcggctcgtcacatcctggggctggagaaggtcccaagggttgggctgttcgcccattaaagtggcacgcgagctgggttcagaacgtcgtgagacagttcggtctctatctgttgtgggcgcaggaaatttgcggagatccgacactagtacgagaggaccgtgttggacagacccctggtgcatcggttgttccgccaggagcacagccgagtagctaagtctggaagggataagcgctgaaagcatctaagtgcgaagcccactccaagataagatttccatatagggacgtcaaagacgatgacgtagataggccgcaggtgtacaggcagcaatgtcacagccgagcggtactaatagcccgaaactttcggaagcgcgagaggtcgagggtagataagggaggcagagattgcgagagactcttttttttcgtcaaggatcgcgacattcaggcggttacagcgcgggggatccacctctacccattccgaacagagaagttaagccccgccacgccgatggtactgcgcaagtgggagagtaggtagccgccaacttatagaagagagagccggagagggagaaccccttcggctttctctctttttgtatataggactcgcaacagcgttacctgaccgaattgacttctttctctcttattttactgtactacacttgcttcttcaattccttcaatgaacttctctctccaacggcggccccgtggcctccccgttttgcgaaagtgctgcaaagatactgcctttctctattacattccaaatttttctcaatgtttttttaggggctcaatatggccggaacatacctgcttgcaatgataatattatttcttaataaatttaaaacagcttcttattaggaggaaagaaaaaaactcgataaaaatgataggaggaatagattacgttcgactttgtcttcgttaccgagggcatcataccttctcccctatgccgggaacaagaagcgatagtttctgaggagaagagttgtaatatacaagaacaatctccacaaattatcgaccgaaccagcgtttaggtgtagctcacttaaatagtattgggaatttttttttggaaaaaatgtttaattataaaatcgtgaagtacagtttgttgcaagaaagttatgttatacagcataaaaaagtggcagaaatatttggaatggagtagggaaatgtattaactttgcaaccgcaaaagaggaaacggggcacgctccggggaactttttgtcaagttcattgaaggaattgaagaatattcgtcttgctgctcgccctgtcgaccggcgagcccctgttggccttgccggcgctcgcactggcagcttacgcctatcggggcgtagccgacataacctcccgttttacggagaaaggaggtgcgcgatgaaaagccatacgatcgagttcacccgcgacgacctggtcgttcggatcacccgctacccggccggagaaccggggaaatcgccgtcggtagagatagaggtcgaatcctccggattgccccggtcgttcgtatggttcgacagggagccgcagctgttcgccttcaaagccgccaacttatagaagagagagccggagagggagaaccccttcggctttctctctttttgtatataggactcgcaacgaggcaaggcaagagagacacatgaacgcccccaaagttccgaaaaggtaaaaagctgttcaaagcgacacttttacccctctccccctgtaccggaatgctgaacaggagagaagtgctaagcccctcgggaacgagtgcagaaatttttcattattcttgtaccaaagcctttttgaaaatagcttcgacttcgttgggatagataccgccctcgtgcaccttttcgtctgcgatgtaaaacgttggaacgtaatagtaatcatattggtctgcaatatcggggtgttcggtttcttcaatggtttcgatgataatgtctttatattcgggacgttttttcaattcgtcgatgtaattgaatgcccgtttacaaaatgggcaacgagcttgatagaataatttgatgggcttcattttcgtagattgttttttatatacaaatatactttctattttggagtgtagtatttttacttgtattatttttgtatgaaatgtaaaatatgaaaatatatgaaacgtttttatcaaatgggtttaattgttacggtgatttcagtattatcgctcgtatcgtgcggagtgcacagtaaaaattcgtatttgaaagagttcgaatcatttgtggataaagtggagaataccgatttcgacaccgaggcggagtggaacgaggcattgaaagaatacgagcggtttaccacaacgtattatgaagagtataaagataaactgaccgaagaagatttagtggagattggacgcttgcagggacgttttatgaaagcatcgatgacaagaggtgctaaatttatcgaaaaaaatttcaatgatgccatacagcaggcatccggattactcgatggtctattcgaagagaatgaagacgaagaataagaagctgttttaaatttattgagaaataatattatcatttcaagcaggtatgttccggccatgttgagcccctgtctcgcatcttgaatcccttgatttttgtcaatagcccgctattgactgcatatctcggactccaatctgcttcaacatgggtctcaatctgtctcggaataaatttaaaacagcttctaaattttaacgtcttgttttttatccccggagcgatccttcggggcttttttattaaaagccggttcgaataaaaaattacggagatagactttgttcccttgtgatgtttctttgtgtttggatataaggtgcgattcaatagaaaaaataagtaaaactcttttttctgcacttacctttcactacttttgtaaagtatgtgaaaatgaagtatgacttggcggaataaaattctgtgtttgtctttcgttatttttgcaggggagaggggcagccctttccatacatattaaattaaaaagaagcgttatgcttgtcttgtagtttgaaaacctgagaaattttctaaacgagatacaaggttaggcatggtggttctcgcgcatcacgggcgtgggctgctatctcatatctgtatctcgggttttctcaggaccttcaaactgcggtgtgagtgttcagttccacgcttcgttgttatattaaaccttcttatggggacggtaagaagaatcttttcgctatgaaaccgataggggaactcattaaagagcgattgaaagccgaggagcgcagtgtcgcttggtttgcccgcaaactctcttgcagccgggccaatgtgtacaagatattctgcaaagagtatatcgataccgagttgctcacccgtatttctcgaatcttgaactacgatttttttcaatatttctctgaacacttgaaagaggagtaagccgtttgtttgactttttgacgggataaatgtttcacgtagagggctgtgaaggggtttccaatcggtgttcaatttctacttatttgcgacagtagtgtcaatttatagatgatatgagattgttcttaatttctctttttgggattttatttgcataataaaataataaagaggaaatgagaaaattcaaactactattgataagtgttttgtttccgtgtatgtgtatgggtgaaggtgcttatcatgaggataatgagtttattataagggctggattcacaggctctcatttgcgttataaggataatataggggggactgtaaatgtatcgtatattccatttgaaataaattcttgtgggattgggtggaatgccaattttacaaagactaaggattattatagtatcagtccgttgggtgcgacagcaacattattaacattcttggggtatacagtgtcgtcagagatggatagttggattcggactgtattgttttgtatggccgcagaaagtatgggattgtatattcccattgggaaaaattttgagttacagccctattggagtttattaagattatccaaatggcagaaagaaaaaatacttattaccggagcttttggtttagccgctacggtttatataaaaaagttttctataactgcttatggagagtattcctatggatatggaaattccgattggtggggcgaaacacttagtaatgtttttacagatgcagaggacacttattacaataggtatgaaaagccctgtacccctttcaaaggttggatctatggggttacattaggatttagttttaatctttaatattgtgatccagagttctaaataaatagataaggacaagccgaaaaccttatagagtaggcattaatataaattatttattatgagaaagttgtttttattaggaatgctggttgttgtaccttttgtatttgcagtgcaatattctggaaccgacgtggaagaaatgcaaaaagaacggtgtggaggctattccaatcctccttgtaaatgttgtgatggtaaggggcgtactgagtgtacaatgtgtgacggtactgggtggcgtatatgctctttttgtggtggtgaaggaactattgatcgaggaaatgggaaagaaacatgtgctaattgcaatggaaaagggcaatttaagtgtggatattgcaaaaaaggagaacgtatatgtacctgttgtaatggaactggtaaacagagacatgtaggacgatgagttgttattcggttgtgcctttattgtttcgtttttttagtctatttgtgagagttcagctctaagaataagctaattaacgagatgacagatgtgaaaaagactgtgttgaaccgcattatgagattagaaattttatagagtaggagtaaatatgattttgattatgaggaagatatattcgaaattgattgttttattctatgttttatgttgtaacacatcaattctgtttgcccaaaaggatatagaacaagagaagataggctgttattgtaatacagtggaagtagaaaaatcttgtcatcgatgtggaggtaaattaaaaagtgcagtgataaaaggaaagaagaagtgtcctaattgtaaaggctccggaactgttaaaagctacgataatggaagatcggtgagggtgaagtgtacggtagagcataatgggtatgatgccagtgttggtggttattttatttatgagtataaatctggattgaaatgcgaaaattgtggcgaagaatatagccgataataaaacagacggaattgtaaaaaaaacaattccgtctgttttattattgtataagtattcaatacttattatacgaaatcacctcgtcggcagattttcgttttttctcccgaagcggttgggtggagtatcccactacgatgtcgagaatgactcgtttcttatcgggaatatgcagtagtttacgcacggctttctcgtcgaaccaaccgagtatgcaactgcccaatccttcggcagtggcggcgagggtgatgtgtgcggcagctataccgatgtcgagcagcggaaattgtttgtccttgatgagcccgcctatgcccgatgtgaaattgggtcgctcctccacgacaaggatatgcacgggagcctgtttggtgaagtggttcatgcccaatatgcggctggccacggcatcggccacttggtttcgcaactcgggttcgtccactacgatgaagtgccacggttgcgcattgcaggccgagggtgctatacgggcggcttcgagaatacgccgtattttttcgggttcgaccggacgttcgggatcgtactggcggtcgctttgccggtggttgataatttcgtagatatccattttgttctaatctttttcgaagtgcatgatacggctgatgtatttgccgataatgtcgaattcgaggttcactatactgccttccttgatttggtggaaattggtatgctcgtaggtgtagggaatgatcgccacttggaaactgttgtcttgcgagttgcatacggtgaggcttaccccgttcacggtaaccgatcctttctctacggtcatatagcctttggcagccatttcgggattgaggtcgtaggtgaaggtatagtatcggcttccgtcgacaagatcgatttttgtgcagcgggctgtctggtccacatggccttgcacgatgtgtccgtcgaggcggccgttcatgagcatgctacgttcgagattcactttgtctccgacagagagagtccctaagttgctgcgttcgagggtttcttgtatggcagtgaccgtatagtgatctccttcgatgtttacgaccgtgaggcacacgccgttgtgagcgacgctttggtcgattttcaattcgtgagcgaacgaacttttgagcgtaaggtgcaaattcccgttatcccgtttcaaggcaacgatgggagcggcttcttcgacaattcctgaaaacataatttaatgaattaggggttataaatagacaaagtcaaaaatacgaaaattgttcggattgttatgccgtttattcccgaaaatagttatttttgagaaaggatttcctttcatgttaaaaagtgctactatggaaatattgctcccgaaaagaaacgatagcgcacaaaccgaaaaactgttgtcgcggacggtaacggtcgttggcgcgaatggagccggaaaaagccggttcggagtggaaatagctcgacggatacaagaccatgctttttggctttcggctcaaaaggcattgtgcattatgccgcctcacgaagtttggccggggtctatcgaagccatgtatcaggagtttatggagtattcttactatgtatcgaaggatacccctaccgaattcgaccagttgcttttcttgctgttgagcgaggagtgccgcaatctgttcgagtataaattcaaaacgccaaagggggggcatatcgacttccccgagactcgtttggatagagttcaaaagctgtgggaacgggttttcccgagaaataaaatgttgcgggccgaggggcgtttgttgattcaaagcgagaattcggagcctttcaatcctttgcgactgagttcgggggagaaggcggtgctctattatatagcaggtgtgctgtttgctatgcccaatgctgtgattttggtggaagatcctgaattctatctgcaccattccattatgaaatcgctgtgggattcgattgagaacttgcgcaaggattgtacttttgtttatctgacgcacgatttggatttcgcggcttcgcgtgtcgagagtacttgtatttgggtccgttcgttcgatgccgaccgcatgagttgggactatgagtttatccgtaacgacgactcttttcccgaaggcatgtatttggatatattgggcagccgcaaaccggtattgtttatcgagggagcagctaccggaagtatcgatgtgaaactctatccctatattttccctgaatacaccgtgaagccgttgggtggttgtaataaggtaatagaagcgacaagggcttttgccgatttgaaggagatacaccatctcgaatctaggggaattgtcgacagggatcggcggacggagcgagaagtcgagtatttgcgcagtcgtcatgtgtatgtgcccgaagtagcggaagtggagaatctgttaatgctcgaaggggtgattcgctcggttgcccgacgtatgaaacgaaacgagaacaaagtattcgaaatagtaaaaaacaatgtcattcagttgttcgcacaagagatagagtcgcaggcattgttacatacccgtcaccgcatacggcgtgatttggaatataaaatcgaccggaggttcaacgatatcggttcgttcgaggaccatatcgaccatttgacggacgataccgatgtacgcggactttataatatgatttgcagtcaattccgtacatttgtcaagaacagagattaccggtcgatattgaaggtttacaatcagaagtcgatgttgacgaacagtaatgtctgtaacctgtgcggattggcgaataaagataaatatttgagggtgatactttccatattgcgggaagatagaccggaagccgagggcatacgctctacgatacgggcctgtttcggattggataaagaagagtctcatggttaaggattggatttcggcggctcgtccgcgcacgctgccggcatcggccagcccggtgatcgccgcttcggcttatgccttttatgccggtacatttcgttgggttcccgccgtgttgtgtttgttgttcgctttattggcacaagtcgcctctaatatggcgaacgactacttcgattatgtgaaggggagcgataaagccggtagggtaggacctcgtcgagccgtcgcttcgggcgatataactccgcgagccatgcttatgggtacattctgcgttttaggagtggcttgtgcggtaggattgggacttgttttttttgccggttggcagttgataccgataggtgtgattatagcggtgtttgcattggcctatacggcaggtccttatccgttggcctatcacggattgggcgatgtaaccgtgtttttgtttttcggtctggttgctgtgaacatgacctattatgtacaggctttacagttcgatgcagatgtgtttctgctgtcgatcgctatgggattgttgtctataaatattctgttggtgaataattatcgggacatggaagaagacgctgcggcgaataaacgaacgacggtggtgctgttcgggaggcgttttgctttgtggtggtattttgtgaacggggtgatcgccgttttgttgcttttaccttgtttggcagatttcggaatcgtgtatatatttttaccagccattgtatatctgtttcttcatataaagacagggttggcgattaagcagcgggtgggtgaggcattgaatcccctgctgggagcgacggctcggaatctactcgtttttacgattttggtttctgtggtgtggatatgtaaaggattaggattatgagcaggacgattttattcattgccgcattttggttggctgtgccattgtgggggcagtcgggtattatgccgcgccgaagttcttctataaaaattccgagtcaggaaacaatggagaaaataaccgaagccgaccccgagttggtaagtcgggaaccggtatcgacattatccgatacgatatctcgggcgttgctgttttctccggtagctgtcgatatgttagggttcgataaacgtatgagcgatacgaaagaaagtttccttttgcgaaacaatacaccttatcggttgtctcgggtagtcttgaaaatgatttatcgtaccccagacggtcaaatgatcgattatcgtactcgcatggtggattgtgatcttttgcctcgttcgactcgcaagtgtgaaatcgagagtttcgaccgttcgaaaaattattatcatgtcgattctcccccgtctcgtgtgtctggacgtccgttcaaagtgagtttcctgctattgagatatgatattgtgatagagccgtaactcttttttataacttctcgtcaactttaacgccttacggttgacccaaaaggggtatctccttgttttaagagtgattgtcggaataacccggcaacgttaatttataaacttatttaggaggtataattatgacacctgcaaagcatcaacaaaactggctccccggaatttttaacgatttcttcggaaatgaatggatcgctaaaactagcagtgcggctccggccattaatattgtagaaacggaaaaggaatatgaggtccaaattgcagcaccgggtattaccaaagacgacttcgatataacggtcgacaaagaaaatcatttggtcgttacggtagagcacaaacaagaggaaagcgaaaaggataaaaaaggacgttatttgcgccgagaattttcgtattcgcaatttcaacagactttgattttaccggataatgtcaatacggatgccattgaagcacatcagaacaacggtgtattgacagtgatgattccgaaaaagcaaactcctatgatggcagaaaaaaagaaaattatggtaaaataaactttttctgcatggatagcatacataaaagagagggctgcaatttgcggccctctcttttatgtattatcgccacgtgaaattcttttttctcgttacagaacctattaccttgaaataaaggtttatacatggttgtatgaaggaaaagaacggtaaggagaaaaaaagtctcggtttgcggagtatttttgcagcccgtcgatagacgatgactttgatcgagaataaagacaaggccagtatcgaggccaaaacagcggttgtccaattatgtatgatgccctctacccatagacaaacgaacagaatatcgaaagcataatcaaagaacttagctatgccgaatatcgatttggctgtggtatgaaggtatttggaagtaaagtcgtattgtagcttcaattctttccatgcttcgtagttatcctgataagtcgcggtcatttgtcccgcttcggatatttctacacgggtgttggttcggttggctatctcgttgatgaacaggtcgtcgtctccgtagtgcagatgtagaaatttggaaaaccctttatttttgaagaataattctttacggtatgccatgttggaacttactcccatataaggccgattgatgagggcgaaagacaaatatcggatagaaaataacagttggtcataagagcaataccagaaagagaatttttctttttcctttcgttcaatggccgtatagcctaaaacaatgtcgattccgggaacgaagtttcgggcgatagtggccaaccattcgttgtttcttggatcgcaattggcgtttgtgaatacgactatatcgtatcgagcggcttttataccgagggtcagagccagttttttatggcttaggttgcgcgatccttccggtacgtaggtgtggtatagatttttatattgcgtctccaaaacggagagtatgtctttggaatcgtcggttgaatcgtcattgactacgatgacttcgaattcggggtatgcctgatttagaattttgggcatgtatttaacgaggttttcggcatcgttttgggcataaacgattaccgataccgcaggatattggtgggtatattctatttttccgtttttttctttttgataaaagtgaaaggggcgattgaaaagataaaattgatagattatttcgataatccaaatcagaatcagtatccccaagcaatatatttctggggtagaaaaatcccaagaaaagtttaaatccataacgtgtgataaaatgaattacaaacgtacataaactttttcaaacagaccgtttgaaatgattttaatattcttttttatcgaagaccgatagaaaatagtatattaagaagctgtatgtaagaacttttcgtgaatggtgaaaaattgtaagaaaaaaattgtaataaaggttcaaaaagatgttgagatatgtataataaaagggcttggtacaacgttataaaatagaattataccgggctaatccggacggaaaagaataatgtaatgaaaataaatgtgttaagtgctattgtcttattgcttgtggtttcttcctgttcaaccagtaagactgcttattttgaaaatttggatattgaagagatgagcggaaagatggatgtaggcaattatgaattgcgaatagctcccgacgatatgctatcgataacggtttcgtcggttgttcccgatgcggccgcaccttataatttaccggctgtttcctattctgagccggggaagcaagagctgacgattgtgcctaatttacaagtctatacggtagataaaaatggctatatctatttcccgatagtagggcgtattcgagccgaaggaatgacccgcaatgaactgtcgaagtttatagaggataaaattcgtcctgagctgaaagacccttttgtattggtacaattcatgaattttaaagtcgttgtactgggcgaagtgaaaaccccggggcagatatcggtacaaacagagcgtatgtcgatactcgatgccataggtgcggcaggagatttgactatctatggtgaacggaaaaatgtattgttgatgcgggaagaaaatggtaagcggatttttcatcgtttcgatttgaccgatcaatctctatttgaatcgccctatttttatttaagacagaacgatgtcgtttacgttatgccgaataaagcgcagcgaaataattcgaattacaatcaattggcacaatatcgcatatctgtggtgagtactgttgtgagtgccatttcggtgttggcatcgttggcgatagcattgttcattaagtaatgaaaagattttttttatggaagaaaaatatacctcggaaagaagaaatgataatatcgatatcgtcgctttatggcgtgccgcatgtagaaaatggtatctctttgtagggtcgattgttgtttgtgtagcgttggtagtttgttatttgaagattgccaagcctgtatatgaggtttctgccgatattcttgtcaatgaagatgagaaaaaaggcggtggcggattgtcttcattgatgggggatattgcaggaggcggattctcgttagacggtatgataggtggtggctcggtgaatgacgagatattggttatttcgtcgcattctttaattcgagaaatggttcaaagactcgatttgaatatatcatatacgagcaaaaaaaactttttcaaaaagaaagagtattatcgtaattctccccttaccgtagaaattcccgaatcgatggtggatacattgtcgagtggatttgtagttaaagttcaaacgggtgactctgacgataaaatcaaggtcttgttgaagaaagggttctttacgactttggtcgaaatggaagcgacatcgttcccgataaaggtagattatggagaggggattattatcgataagacccaattttatgagccgggcaagaagttgaagtttgtcgctcatgttaacgggtatgacggcgaagctgaaatattggagaaaaggctggatatcgatttgtcggataaaaaagctaattgcatttcattaaaaataagggaatcgaataagcaaagaggaaaagatatactcaatacgttgatagaatgttataacgaggatgctgtgctgaataaaaacttgaaggcgcaaaatatgctttcgtttatcgatgagcgtttgataacggtaaaagaagaactccatgaagccgagaggattgtagaacggtataaaagagaaaacgatttgtccgatatagatgccgaagccaaaatcattcttgaagcaaacagtcaataccgcaaattactgttggaagccgaaacacaatattcgattatttcgatggtagatagtttcctgaataagccggaaaacaagtattctttggttcctgttacgaccggtttgcccgatcggggagctgccgaggcgattaatgaatataataaattgctattggagagaatgcgtttgcttcgtacagcaaaggattcgaacttggctttacgtacacttaccgctcaaatagatgtcatgcgtgagaatatattgaatacggtgtcgaaagcgaaagaaagttcggatatagcccgtaccgatttgaagaaacaagaggaggattttcggtctaggttgcggggattccctgagcaagagagagagtatatggatataaaaaggaatcagcttattaagaatgaattatatactttcttgatgaagaggcgggaggagagcgctatgacattggcggcgacttcgcctaaatgtaggattgtcaatccggcttatagtaaaaataaaccggttgcaccgcaatctttgattcttttattgatcgcttgtggaatcggattggtactgcccgttgtctacttatatggaaagactgttttctctgtgaagttcaataacaaaaatgatttgcgcagattgacagatttgcctattgctggtgaaatttgtcatagttctacttcgggctatgtcgttttgagagaaaacagtgtttctcctgccgctgaaatgttccgtttattacggtctaatttacaatttatgttgccgggtggaggaaagggtattctgttggtaacctcgtcagaaccgggagaaggaaaatcgttcgtcagtcttaatctggcttactcgatagctttaatgaggaagcgtacggttttgatcgatttggatttgcggaatccgaaaattgctgattatttggggctctcggtgactactgggctgacgaattatttggtttcgaataaagaaggtggagagaacgatttgattcatcatgtggcacaagaaggctttcttgatgtcataacggccggccccgttccaccgaatccttccgagcttttattgtccgaaaaattggatagtttaatggctcgtcttcgagaaaaatatgattatgtaattgtcgatacagctcctgtggagagagtttctgatacgttctcgttgactcgttttgtcgatgccacgttatatgtttgcagggctgattatacgcataaaaatagtgtattcaatgtcgaggattttgtagcagagggttctttgaaaaatgtaatgttcgtcttgaacgatacggaaataaaaaagacttatgggtattcggtgaaacatacaaggggataagcgatgatttccttgaataaaatattctatgggctgtttattctgatgcttgtggcggggatttatacctatcaattgatgtggtttaaaagttccgacgagttgattacattgcttttagctcttttatgtgtactggatatattaagtaataagaaccatcggcgttataaaggtcttttttggatcgtagggataatgacgttttacctgttgtattcgttggttggcgttcattataatacccctaaggcgatattctatgatttttttattcaaatcaagcccttcatcgctttttatgtagcttatgctatgggggtaaggtttacgggagctcaaaaactttttttgaaaaaactatgcgttgttctcagtgtggcgatgctgggaataatacttgtaggcttaggagaggctttcttctttcatgtagcgtactatggtcttatcagtacggttttatttttgatatattattattgctcttgccaggatatgtgccgtaaggacaagattatcatgctgtttatcttgtctgtggggttttttagcacacgctccaaattttatggattttatgtggccgcactgtatctctttttgtggtacaaaccgggacaattgtcgaaagtaaagttaaagcagtgggtaatgatggctttggttttctgtggcgtcttatatgtagcttgggataaaatcaattattattttatttcttccggtttgttttccggggaggagaatatggacgaatcctttgctcgggctgcactatatatcagggctcctcaggctttgatggaccatttctttctgggttctggattggcatcgtatgccacctattcttcgggaataataggctattcgcttttgtataaagaatacaatttagatgaggtttggggactgttggaaggcgattgtccgtttgtttccgatacctatttcccggagttggtacaatttggaatggtagggattgtattgttcttttatttttggatatgggtatataaaaaactgaaaattattataggttctccttatgcggtgcacctccataaaataggcttgatgatcattttgtttatattcattgagtcggttgcgggtagtgctttcttgcaaggttccggtattgttgtaatgattctgttgggctttgtcgtaagagatatttctgtgataagagagaaagaaacaagggtatcaaaagaagcgatggtgaagaaatgaatagaagtacgaaatttataaacgatatttttatttatgccataggaaacctcggatccaaattgatcacatttcttttggttcctctatatacatattatatatcccccgatgattttggatattatgatattgtcctgactcttacgtttttggcaatggggtttataacgtttcaattgcgagacggtacttttcgttttttgctcgataatgaagacgaatatactcgtaaaggagtcgtttcgttttcctataaattgatggcccaatcctctttggtggtattgttggtggggattgttttttctttcttttacgatatacgggattgggggtggattgtcgcatttgtaatcacgctttcgttgtatgaggtagaagtccaaatcgtaagaggcttgggacaaaataaatcttttgtcttggccggtatattgaccgcctttcagataggattgtacagtttgatttttgttgcttggttacgaatgggaattgcgggcatattttgttccaatatattgtcccgtttggtgacaatggttattatagaatttcgggcacgagtatttaaacgctattttatcgttagttttagagataagtctctgaatagagctctgttgaaatattctttgcctttgttgccgaatgctgtttgctggtggcttttgggaagttccagtcgattgtttatagaacatttcttaggtttggaggccaatggtatatttgcggtagccatgaaattctctactatattagagacattttcggtgatcgtatatcaagcatggcaagagactgctattaaacagtacggggcggcagaccggtcgaagttcttttccagaatattcaatacatatattctcatattgtccgttttagcgctgatttttgttttcgtgctgaaaatcaattattcatggctggtggattctcgttatttagagagtttgcaatatttatatccgatgtttatctcggtaatttgttttgcattggcatcgttttacgatttgggctatcaatgttcgaagcagaccgtgagaaatctgccgggagtgattactacaacgggattgaatttaatcatgaattatgttttcattcgttttatgggtatttggggaattgtcctttcgtccattctttcttatctgtttatgcttggtttccggataatcgatacgtggaaattttttccggtgaaggtatcgatggaaatcatttatccgattttgttcttgataggaggggcgatagtattttatagggtagattcgattatattgcaaatcatttatattacagtgattgtgattcttagctattgtattcaaccgagaacgattcggcaggaattacaaatgaagataaaagccttgtttaattgaataaaattttggcataaataaacgagttcgttggtaatcttatttatacgaagacttacagcatgttgcgaaaataggttacacttggcagggccaaatttatttgtttctgctttcgtttgtgctatctttgcggtaataaatagactttacgtatgaaaatcatagttatcaatcccattctttttactcatgaaaaaggagttataccacatgtaactactataaaagagacgatgatctatgatttgtgtttggcttatcatcgagccgggcatgctgtcacattgatagcggcagccgattatgcacctgagagagaggagacgtatgattttgaagtcgtctttttgaagtcgattggacgaaaaatatttcaaccgagtgtacttccctttttaccgggagtatggaggtacttacagcaaagaaaaggtgatgtcgatatggttttagcaagtgagactttttctataccgtcattgtttgcttcgctcattgtccctcgtaaaactgtaatttggcaggaattaggagctcacaatcgcaagatgaaaacttggccttctcgcatttggtataatataatagctcgctgttttatgcgtaaggcttggattatacctcggtcgtatgtctcgcagcggttcattcggcgatatatgcctcgtgtcggcgaccccataggacatggggtagtagtgacattggagaaagagatgtcgaataaaaagagccagttcttgactgtcggacgtttattttgggaaaagaatgtcatatctgttattcgtaagttcgatgcttttctttcaaaatatcctcaatacagagattacatattgtatatagccggcgatggcgtgttgagagaagagtatgaccgacaaataaaagaaatggggcgagagcggcaaatcgtcctattggggaaactgcctcataaagaattgtttcggtattatcgggattcgaaggcttctttgttcgattctctgcgagagttgaatatgctggcgattatggaatctgtggcgatgacaacgccggtggttacgaatcgtgtgccgtttgatagtgagatagtagagaagcgaaagttgggaatcgctaaaaatgactggaacgaggacgatatagctcgaatgatagagcgaaatgacgagtatgtggaaaattgcagggaatatgcttctttaattactgtcgatgcggtcgctcgacgaattatagattcgtttgagaaggcttcgaaatataatagctgatgggaaagattcgggatataacgttcgatatagcaaagggaatagggattgtattggtcgttatcgggcattatattcccgataacgctccttcgtggtatatcggatttgtaagttttgtctatcatttccacatgcctctttttttcatgatcgctggttttttttatgagcgttctataaaaaagataggttattggcggtttgtacgctcgaagttcgagcgattgatgtttccctattttattctttcttgggcgattatagggattaaaatactggtcgacgggtttatgcaagtcgatcacccggtttcgataagcgctttatatcgagtgttttattttccggaagccgggtattttttatggtttgtttatgttttgtttttaatattttgtatcgtcccggtttttaagtcagggaatcgcttggtactattgtctcttctttcgctggggctcgctttttgggatacggctcccgaatatttttgtattgaacagttttgtttgaattcgattttttttgtatcaggaatgtgggtggcccgaaaatcatggatagagcaagcgatataccggtattctattctttggattgtaattacgatcggcttctcgatcatatatgaatttatttccgataaattttggatcgaaactttggccgtcctcctcggtgtcaccggtagttttatgattctgggcatatccaagtcattatctcgtttaactgtctcatttgtagaatggttgaagtatataggaactatgtccatgactatatatttgtttcatactctatttatgggtgtggtaaagtcaattttaacacatatattgtcgggcggaaatataatagaatttgtgttcgttacgttatttatagtaggaacgggaatagtctgtcccattttattgtataaatgggtatggataaaaaataaatttacgtcccgaatatttaaataacctgaacacgacccatgaagcgaatgccacgtatccttttggtaaataaattttactatccgagagggggagattgtatttgtatgatcaatctcgaagccttgttacgtcgtctcggatatgaagtggccgtgtattctatggtttattctcagaatttgcccagtgaaatgtcgggctattttgcatcggaaatttcattttccgatggacttaaaaataagacaagagcggcttgccgtatctttggattaggagatataaaaaaatcgtttaagaagatattgaatgattttcgtcctgacatagtccattttcacaatattcattcttatctttctccggtcgtcgtaaaattggcgaaagaatatggctgtcgtactgtttggacgctacatgattataaattgttatgtccatcgtataactgcctttgtcaagggaaaatttgtgaagcctgctttaccgatcgttttcaagtatttcgtcggaaatgtatgaaaggaagccggatagccagcgcattggcttatggagaagccttatggtggaatcggaaaaaactgcaacgctgggtcgatacttttgtttgccctagttcttttatggcacagaagatgagagcctgcggttatgattacacgaaattatccgtaatttgtaattttatagaacaggataaattggatttttttcattcgacagagataaatgaaggggaaaagtcgcgctactattgctatgtaggtcgtttgtccgaggaaaaaggtgtacgcatgttgctcgaagtggcagagtctctgccattccctctgtatattgcgggagatgggccgttgctgaatgagttgcaggcaaaatatagttcgggaaatgtcatttttttaggacacctttcgtctatggagatagtacgattggtgaaacatgcgcagacgatggtagttccttccatttggtatgaaaataatccgttaagtgtgatagagtctttgtgtatgggaacgccggttatcggagccgaagtcggtggaataccggaactgatacgtgagggcgatggtatgttgttccgcatgggagataaggaagaattagcctcggctattgtttctgtgatgtctaaggacaacgtggatacacaaggtattgcacgacgagcccaaaaacgattctcggaggaacgatattgggcggaattgaagagtgtgtatgacttgtgaaaacaagatgttcgatatataaaatttttgatagaccggtgaaaaaggtttatctttgcataatatttgtaagaaatgaaagtttttgcgcctaccgatataagcattattaccacttatcgctgccccatgcagtgtaagatgtgtaatatctggaaaaatccgacagatccgcggctggaaattcaaccggaagaattggagattttgccgcatgtgaaatttatcaatataacagggggagaaccttttattcgtgaagatttagataagattgtggaggtcgcttttcgaaaagcccccagagttgttatttccacgtcggggtggttcgaggagcgagtattggagttggcgagaaaattccccaaaataggaatacgtatcagtatcgagggtttatcccaaaagaatgatgaattacggggaagagccggaggttttgataaagggttgaggactctcttgtcacttagggaaatgggcgtgaaggatattgggttcggtataacggtgtcgaataataattccgaagatatgctttccctatatcgtctttccaaagccttgaatatggagttcgctaccgctgcgtttcataattcgtattattttcacaaagatgacaatgtgattaccaatcgcgataccgtttgtggtaactttgccgagctgatcaatatgcaaatgagggaaaaacaccccaaatcatgggcacgggcattttttaatatgggattgataaactatatcgaaggaaatcgccgtatgttgccgtgtgaagcaggtttgatgaattgtttcatagatccttatggcgaagtttatccttgcaatgggttggaagctaagtattggaaagagagtatgggaaacattcgacaggcgaactctttttcggatatttggagcagcgaacaagcccaacatgtgcgtagtttagtacgcaaatgtccgaagaattgttggatggtcggcacggtctctccggttatgaagaaatttgcttatgcccgtcaccccatggggtggattatcaaaaataaattacgttctcttttagggaaacctgtttgtctggataagaaatggtacgacgtggggcaagatcccatgcaggggaatttaggacgtgagtaaacgggggaggggagtgttgcgatgaagatagttgtagtcggtactcgtggtatccccgatattcagggaggtgtggaaacacactgtgaggaattatatccccgattagctgctatgggacatgatgtgacggttgttcgtcgttcgtgttacgtcactccccaaaataagattaaggagtatagaggtgttcatctaaaagatatttatgctccccgcagaaaaagtatagaagccattgttcacacttttttagcgattatttatgctcgttgggtcggtgctgacgttttacatatccatgctatcggcccggctttgttaaccccgttggcccggttgttgggattacgagtggtgatgacccatcacggtcccgattatgataggcagaagtggaataagacagctaagtctgtgctcagatggggcgaacgaatgggggcgaattatgccaacgaagtgattgtaatttctactgtgatagataatattttacgtgaaaagtatgatcgcacggacgcgcacttgatttataatggcgtgaataagcctgtgccggcaaaaaacgacagttatattcggtcgttggggttgacacctcgacgatatgttttggccgtaggacgttttgtggaggagaaaggattcgatttactcataaaagcatttgctcgtatttccgattcgaactgcaaattggtcatagctggtgatgccgaccatgaagatcattattctgtctctttaaaacggctggcagaagaacaccatgtcgttctcacaggcttcgtaaggggggctaaattgaatgagctcttttcccatgcgcgtttgtttgtccttccgtcttttcatgaaggactgcccattgtgctgctcgaagcgttgagttatcggttgccggtattggtcagcgacattccggcaaataggcttgcctgcctcgatgcctccgattttttcgtcacggggaacatcggctcgttggaagagaaattatcttgtaaattagagggagaaatggaagaacgtcattatgatttatctccttataattgggactatattgcgtctcaggtagattctgtatatcggttaggtaagaaaccccgataataaaaaatattccttcgataaaaatttccgctattttcgaactatcttttgtcggttttgtttttggagtataacaatggtgttattacataacaatcaaaacaaaactgatatgaaaaaactaatcccaattctttttgtcgtagcggtattagctgcatgccaaaaagagcccagcctttccaagctggatgatgattatgtggtgtttaccgattatgataaatcggccgacttcggcgaatatctcacctattatatgccggatagtgtcttactcattacgaataatgaaaaagcgacctattggacaaatgaagatgccgattatattctcgaaacatttgccgacaatatggctgctcggggattcacattggtcgattcgaaagaagatgccgatttagggttacaggtaagctatattgaagacgtacgttatttcgtcgattatcccaatgactattggtggtggggatatcccggatattggggacccggatattggggatcatattggaacagttggtattatccctatcccgtagtatatagttatagtgtgaattcatttttggccgagttagtcgacttaacgaataaaaacagtagcaatcgacggttaacgattctttgggattcctatatggccggattgaagagtggctcccctagattaaatagaaatttaataatccaagcgatagaccagtcgtttgttcagtctccttatttgacgaataaataacgggctaccccattttgtatattaataaaaagaaaacgaattatgaaaactattaaacacatatcgttatgggtggtagtcgctacttgtatggtagccgtgtcgacccggggaaacgcacaagccgtttcgagtacttattttaatgtcgattggcagtttaacgctcctgttgggaacagttatgccgataaagccagtggatggggtatgaattttgaaggtggttattatgtaatgcctaaaatggctattggagcttttatttcttatcacacgaataataaatatatagacaggcagactttgatgttaaagagcaattcggctcttacgaccgaccagcaacattcgttgtttcagctaccctttggtctgttggcaaaatatcgctttacgaccgacggaattttagaaccttatgcaacggtgaaattgggcgccaattatagtcgcatgtcttcttatttgcaggcttgggagatttatgatgatacatggggttttaccgtgtctcccgaaatcggagtgagtattttcccgaatccgagtgtccgttatggtttccacgtagctttatattataattatgctactaataagagtaaagtattgacctatgatatcgatggtcgtaacaatatagggttccgtttaggtgtctctttctaaaaaggttagtctcggtataaagggggaataaatgtatattcatacactttattccccttttttgttaaataaagaaaggggagttgtgccgtagtgctttatatattatttttgtctcgattatcaataatattcatacattatgtatcatcgtttgagagtaggattattagtcgttttctgtttatctatcggaaatttattcggggtttttgcccaacattcgacagattactattctttgtcgatggccggaaatgccggaaacgggatttttgcaccgtattatttgtctgccaataagcatgggttggtaacacacagtaaaagcggatatttgcgagcctcggtttttaaaggcttggagatgaacaaacggttttcctatgagttcggtatcgatttggttggattgatgtcttctacatctccggtatcctattattcagacggaaacctgaaaacgtataatccgggtgtgtcgtctttcctcatacaacaagcctatataggcatgaaataccgcatgatttttatatcggcaggttgtcgggagcttaccgatgaagtagtgaattttgagttgagttccggcgggttggtctggtcgggtaatgcacggcctataccccaagttagagccggatttatcgattttgtagatattccgtttacgaagggctgggtacagattaagggtgagctcgcgtatggaaagtttatggacaacgattttttaagagaccattacaattattataatcagtatattacgaccgatgctttatatcaccataaatccatttcgtttcgttccaatcccgacaaaccctttgtcgtaacgatcggagccgaactggcagcacagttcggaggcacaaaacggtattataaagagggcgttttgatagattctctcacgatgaaaagtccgacacgcttgaaagatttttttaaaatcttgtttccgtcgtctggtgatggtcagtccaataaaggcgatcaggcctactactatggaaaccatgtgggacaatggaatttatcggcggaatacaggttcaaaaacaattcttctgtaagaggttacttcgaatggtattacgacgatgcatcgggaatggggaagttcaatggttgggacggtctatgggggcttgaatataagagcggtaagaaaaactggctgtcgaatgtcgttttagaatatttggatatgaccaatcaaagtgggcctctgaattggtgtccgagtgattataatgatcctaaattggatatagaagccacaggagccgatgattactacaataactatttctataacggttgggcgcattacggcctttccaatggtacggcaatggctaaatccttgttgtacaatacagatggttatatgagatacaagcataacagaatacgaggagtccatttaggagcgtcgggttatatcgctcctgaatggaaatataaaatattagcgtcgtatcgaacctcttggggaacgacttttcttccgttagccgatacccaacacgatatgtcggggctgatagaatgtgtttattctccgataaaactttcggggtggtcgttttccgcttctttggccggagattggggcgaattgtatggagataaatggggtgttgctatcggtatcaggaaaagtggaattttaacaattggaaaatgaagaacaagatgatgattcgccgtattttaataggattgtttttggggattgttgtcacctcttgtactcataatgatgggtatataggtcctcttttcgggaaatggcaattgattgagatgtgggagaatggtacaatgaccccacatgatagtctttactataattttcagagtagtgtcataaagttacaattggttcatcggggaggaatagaaaatgcaacagacaattatttcgggagttacgttcgcgaagatgacatactgaaatttaaaataatggaaccctcttggtttgaaacagaactacctcctgttttcaagttgaaaatgaacgaggaatatactttttacattgagaaacttacctcttccaaaatgattttgacccggggtgaagatgaacgctttgttttccgaaagttctgaatttacagatatcggatttcccgattttcagaattctccgagatttgcttgggatataatttaatgaatcctgaccggggatcgaataagtcttctaattttttagcgctgtttcctgagaataaaatgccgttgaggtcagaagttagtctggccgaaaaccttttgggggcgtaaagtattgcacctgtcagtttatgtttatagagccagatgaaacaagtgttaggatttactccgcgagttaagtaccctaaaatagttccgacgggaatttcactgcgtaccgacgaatccaatttaacgattcggtgtgtaaagatttcggaaaatcgaatgtctttaaaccgttcgatagcgactctttctccattttctgtcaggagccaaataccttcccaactgtcgattggagctgtatcgaaataatgtttggcactttcttcggtataattttcaagaatgaaactacgataaggaggcttactttcataacgcccttcttcatcttttatcgatgaggaacagagcataccgatgcatagtaaaactatgagtttgattctcattagaatttatagttgaatccgaaacttagtaattctttcagttggaaatgtccgaagtctttgttcagcgcgcgagcatcgtcatatcgcagatgaacaaacaaacgagtagagaagaaacggttgaggataaagtcgaatgtattttccatatccccttgtacatgatcatagttggtgaaataaaacagtctgcaactccaaaccatgttatgatagaactcccatttgatgcgcccttcgaaggaggaaccgtattgactcatgcttttccccgatttgattccgaagctggccgcatccatgtcgtcgttaacgatgaattgcaagttgtaagaaagtggggagagcgatatcgatgtctcgaaacgttttttatcgtttttatattgataagacatacctaaacccaaattcaactcagcaggagatagaaatgcagccaccttgttgttggaattagcggcataactggtgaaaaattgtgtcttgaaattcatggtcgcagtgtagtaccatttgttgtaggctttaagaccgaatttcgagtttatctggaataaatcttcactgatttttacggaatgcaatgtgtcttccggggcactgttgatgttcaatctccattgtactaaattctcgaataagatgcgttgctctttgggatcgttatatttgatagagaattgttgatcgcttagcagattgacattgctcgtccctccttgataccaattctccgaaacatagacttgggaaaattgtatggacgattggaagttgattatccatcgttttagtttgatcttttcttttcccacgtcattttttataatcagcggcttttctttgatagagagaatatgtttggccggatcgttttcgatcacgtattgtttaggcacttccggtagattgtctgtattgtaatgtataagtttcgggtaattgacgattacatagttctgtgctaaatttcgggtcttttcggcttgaatctcgtcttgtaaccatttatcgtccaccgaaagagactttggtttgaatgggcatttttcggccgagggtaaatgttgaaaaggagtagacatctgtttttcgaacacgataggtaagaaaagtgggttgacaggtatttcgcccgacccttgcatagctcttatgctgtcggcatattcgagcatacgcaacattttgataaccggtaaaatctgttcggttgagtctgtttccaataatgaaagtaaattcttgtcggcctcttgctggcgagcgatcgagtcggtatcggtaacctgtatggttatagaatctgatggcatggccattgttatactgtcagatacgatttcgttcgttatactatcgttctgttctatggcagtcgttgcgaatactccggttacagaaagaagacctatgagaatagctgtaattcgtgagttcataagagtatatgtttgtattttttaagatagtgcaacaagtagagagtagaaataggtttattcgattatggcaaggcgtagcctattttcgcatctgtttgcaaagatagtgccaatgagggcaaaagcaagcttgcttgactttgccgaatgcagcctattttcgcatctgtttgcaaagataatgattatttgatacaaattgtttaccgatagtctttcttttgggtaaaaattgtaaagtgtttctacctgttatgggcttttctcttcatagcaaatgaaaagtgataattctgttgaatgttgcgatagattgtggattatttttcctaattttgcgccttgtaaatgtaacacataaaccatattttatcgtggagactaagtatatattcgttacggggggggtaacctcgtcgttgggtaaaggtattatttcggcttcgttggctcgattgcttttggcaagaggttatagagtaactatccaaaagttcgatccttacatcaatatagatcccggaacattgaacccttatgaacatggagaatgttatgtgacggtcgatggacacgaagccgaccttgacttgggtcactacgagcgattcaccaatactcctacgactcgcgccaataatattacaacagggcgtatttatcaaaatgtaatagataaagaacgacggggcgattatttgggaaagacggtgcagattattccgcatattacagatgaaattaaacgtaacattaaacttttaggatcgaagaaccagttcgatttcgtaatcacggagattgggggaacggtcggggatatcgaatctttgccctatctcgaaagtgtacgtcagttgcgttgggaaatgggtaaaaattgtgtatgtattcatttgacctatgtaccttatattgctgccgctaaggaattgaaaaccaaaccgacccaacattcggtaaaacaattgcaggaggtaggtatccaacccgatatattggtattgcgtaccgagtacgagttatctcttgctttacgtaagaaggtggcattgttttgcaatgtagatcctgcggcagtgattcagtcgatagatgttccgtctatatacgaagtccctttgaaaatgcatcaacagcatttagatgaaatcgtattgacaaaaaccggtttacccataaacggagaacctcatttggagccgtggttgaatttcttgcatcgcatgaaaaatgcgactaagaccgtacgtatcggattagtcggcaaatatgtagaacttcccgatgcctataaatctatcaatgaatcgttgtttcaggcggcgacctataacgatcgcaaactcgatttgcaatatattcattccgagaaattaaatagcggaaatgtggacgctatgctttcttctttagatggcgtgttgattgctccgggatttgggcagagaggtatcgaaggaaaattcatcgctttgaaatatgctcgtgaacacgatatcccgacatttggcgtatgtttgggtatgcaatgcatggtgatcgagtatgcccgtgatgtgttggggtataccgatgctaactctaccgaaatggacgtgacgaccaagcataatgtaatagacttgatggaggagcagaaaagcataaccaatatgggtgggacgatgcgtttaggcgcctatgactgtatattggccgaagactctattgctgctaaggcttatggaacgacccatattcgcgaacggcatcgccatcgtttcgaatttaacaatgagtatcgtaaagcttttgaagatgccggaatgcgttgcgtgggcgagaatcccgaaactcatttggtcgaagttgtcgaggttccgtctttgcgttggtatgtgggagtacaatatcaccctgagtacaatagtacggttcttaatccgaatccccttttcgttgactttattaaagcagcgatttcaaaaaaataatttagtaatctcaaaattgaagaatggataaaaacacgattttaggtcttgtattgatggtcgtagttgtgctgcttttctcttggtggatgcagcctacacccgaacaattggaggcacagcgtcggtataacgattcgattgccgctgtggaagcggaacgtatggccgaggccgctttggcagaaacacccgtttcgaccgataccgtttcgggagaagttgccgattcattaaaaaatgcaggtttgatagcgcgtttcggcgagttcgctccttgtgccgaaggttcggaagaatttactactttgtccaataataaggtgacattgaagttttctaataaaggaggtcgtctttatgaggctgttttgaatgattacatggcctatgattccacgaatgtgactctgtttaccggagacgaaaacgactatggattcattattcgtacgaatgcgcgcgtgatcgatacacgcgatttatattttactcccgaaatcgatggtaatgctgtaaatatgacattacagcttgccaatggaagtcagatgggcattcgatattctttgccggaagacagctatatgttgaaaatggatatctggcagaaagatatggaccgggtaattccgtcgagcgctgtttattgggattttatttgggatcagaaaatgcgccgtcaagaacaaggacgtatgtttgaggagagaaatagtgccttgtattataaatttgcaggagacgatgtagagcatttgagcgagtcgggtaacgatgaagagaaagcgactacgagcctcaaatggattggttttaaaaaccagttcttctctactgcttttattgccgatggaaaatttaacgacgggatttttacctctcggtctttggaagaagatagatatttgaaacagtttcatgccgagagtacgatagattatgattcgaaagagccgcaggttgccggattcaatatttttctcggaccgaattcttatccgttattgtcctcttatgacgacgatctttcaggagaccagacactcgatttggataagctcgttccactgggatataagtttttccgttggataaatacgctcgtcgttataccggtattcaccttcttgggtaaatttttcagcaattatggcgttatcattttgttgttgacgatatttataaagctcgttttattccccttcacgtataaatcttataagtcgcaggctcgtatgcgggttttagcccctcaaattaaggagattaatgataagtatccggggcaggataaagcgatggagcgtcagcgtttgacaatggatctgtacagcaaggcgggagtgaatcctatgggcgggtgtttgccgttacttttacaaatgcctattcttattgcgatgttcaccttcttcccgtcttctatcgagcttcggggtgaatcgttcttgtgggcgaaagatttgtcgacctatgatgcgatcgtaagttgggatacttatataccgttgataacgccctattttggtaatcacatcagccttttctgtttgttgatgactattaccaacttgatatacaccaaaatcaatatgcagaataccgccggacaacaacagatgccgggtatgaagttcatgatgtatctgatgcccgtcatgttcttggtattcttcaataattattcggccgggttgagttattattatttcttgtcgttgttgattacgattattcaaacctatgtattccgtaaatgtatcaacgaggagaaggttcttgccgagttgaaagagaatcaaaagaaacctcgcaagaagagcggtttcatggctcggttggaagaagcgcaacgccagcagcaggctgcgttgagagaacaacagaagcaacgaaacaaacaacagcgtcgtcgataaataacgaaggggagcattgctccccttcgttatttatgatagtttcggattttttcctgttttattttacaggaaagataccaaaaacagatttagtcgataacacgttcgggtataagaaaagagattatcccactcgttgagataatctcttttctatatggtaatctatttgccggttagttattttcggggcgtaattttcgaacggtcacaccggcttgccacatctcgctttctcgcaactctttcaactctttgttcaatccatcgcgatatccttctttactgttcgtgtcgatagaacgttgagcttcgttccctttggctacctcttcatacagttcttcgaatacgggtttggtagcatcgcgaaactttttccaccagtcgagagctcctcgctgggctgttgtcgagcagttggcatacatccagtccataccgttttcggcgacaagaggcatcagtgattgggtaagttcttcgaccgtttcgttgaatgcttccgaagggctgtgtccgtgtgcgcgcagtgtgtcgtattgtgcggcgaaaatgccttgaatggcccccatgagagttccccgttctccggtaaggtcggaataaacctcgcgtttgaaagtagtttcaaaaaggtatcccgaaccgactccgataccgagagctataactttctctttggcgtgcccggtcgcatcttggaaaatagcatagctcgaattgagtccccgaccttgcaagaacatgcgccgtaaactggttcccgaacctttgggcgcaaccagtactacatcgacatcggtaggaggaacgatacccgtgcgctctttgtaggtgatggcgaatccatgagaaaaatagagcgttttaccggcggtaagatgttttttcactttgggccatacctctatttgagctgcatcggaaagaaggtactcgataattgttccacgctggcaagcctcttcgatttcgaaaagcgtttcgccgggaacccagccgtcggccaccgctttatcccatgtcttcgagccttttctttgtccgacgatgatattgaatccgttgtcccgcaagttcatactttgtccggggccttgcacgccgtatccgataacggcgatggtttcgtctttgaggatttcccttgccttttccaatggaaattcttcccgggtgactacattttcgtcaacaccgccaaaattcatgattgccattttcttttttgtttagaggttaattaaattggttttatctgttttcaaatatgattcttcctttgcagtacacggtttggtcgtcccgtatttctaaggtaaaataatccggagcttcttcctctttcagcagttgcagggtagaaccgtatcgagcttcgttggcatagcttatttcgaaccgtcggatacgttgtttgtcataccgttcgaaagggaaaaggtcgagttcgtgctcgatgtatttcacactgttgacatgtcggttcaaatctatatcgttataagtcacaggatagattactgcattttcgtcatgtacatcgcgtactctcgattgcttttcgatgggacatgctttgtccgatatgttctcggcgatatattcgaactgacttatatctaccgatgtgcgactatccaaatcgataacgacccaaatcgtgcgggcatatccgcagggagagccgtcctctcccagtatggcgaagtttctcgatgaaaaatgcttgttatacccttcgatccatgtttgtaaagtataatgctcgttgatgagcggataacggtacatttcgacggtgagccgggagagtacccatacttgccggtttttgatgagcgtactatatcccacgccccacgattcggcatgtaacgtagccacttcgagtattcgtttggcgagcagggtgagcggcaactcctgttgaccgtttccttcggccggctctacggtataagttttggagtagaccggttctgtttgtcgtttggattgttcttctttttctttcatagttggttttgtcggtattgttgttcttgtaggaatatgcttacgtgctcgacggtcgatttggttatggcgacacgtcccgaccggacgaattgcatgacgtcgtatcgactcagttcttcgaacagagattgagtttcgtcggggtggcccgatttctcgatgacggtatatgtgcggtttacttccaaaatgcgggcattgtgtttgcgaatcaaatcttcgatgctcctgtcgtccaatagtttgtcggtaggaaccttgtaaagtgcgacctcttgaaaaatgatttcgtcgtcggtataaaagaaggcgcgtaatacgtctattcgtttttctatctgcttgaccagtttttccatcgtttcgcggtcgctgtatgtcgtgatggtaaatttgtgtacaccttcgatagccgagcccgataccgacaggctttcgatattgagctgtcggcgtgtaaagataatcgaaatctgattcagcaatcctacttggttttcagaataaacggttacggtatataatgtctgttgagtcatatcggtcttaatatttttcagtggcgttgagcatgatatgggttacacagctcccggcgggagtcatcgggaataccatgcaatccgggtctatttgtacatcgagcaggtaagctccgcggtggtcgagcatacgtcgtatggcagagtcgagttcttcgcgggtggcgaccctttcgctggctatgccgtaagctgctgccacgcccgtaaaatcgggattcagcattggggtttcggagtagcgatggtcgaagaacaggtcttgccattgttttaccatacccaagaaattattattgagaataatgatcttcacatcgatatcatattgcatgattgtgcccagttcttcgattgtcatttgcagtcctccgtctccggtaaaaaagcagaccgtgcggtcgggattgcctatcttggctccgatagcggcgggaaggccgaatcccatagtgcccaatccgccggaggtaacgatactgcgggatcttttgaaccggtaatatcgggccgatagcatttggttttgtcccacgtcggtcacgagaatactgtcgttgcccgtggcttcggatacctttcgggcgacctctcccatattcatcaatggtttccgggggtgtatctccggttctatgaccttttctttttccaccttttcacacacagagaaagattctatccattcggagtgttcggcgggagcgattttttcattcagcttttgcaatacggcacgggcatcacccagtaccgatacatcgcacttcacgtttttgttaaattccgacgggtcgatgtctatatgaattactttggcttgtcgggcatattgtttcaagtcgcccgttactcggtcgtcgaaccgcatgccgatggcgatgagcaggtcgcattcgttggtcttgatgttggcggctatgctgccatgcatgcctaacatgcctttgtatagggggtggccggtcggtattgccgataatcccaacagagtgcaacctaccggtatatcggctttttcggccagttccgacaattccttttcagcatgggagataattaccccctgaccggcgagtatgaacggtttgcgagactggttgataagccgggcagcttcctctatttcgccgggttgtatgtcgggataagggttgtagctgcgaatgaattgacagggcttgtagtcgaattcggtcattcccgtttgggcatctttggcaatgtcgagaaccacgggacccggacggccgttcccggcgatataaaaagctcttgctaccgcccaagctatttcttcgctgtgacgtatctggtaactccatttggtcaccggctgggtgattcctacgacatcggtttcctgaaaagcgtccgagcccaataggggagaggcgacctgcccggtgatgacgatgagcggcgtgctgtccatcatggcatccgagagccccgtgatgatattggtggcggcgggacccgaggtgaccatgacgactccggtcttccccgatactcgtgcgtacccttgtgcggcatgtgtagctccttgttcgtgtctcacgaggatatgtttcaatttgtctcgataatcgtagagaacatcgaatacgggcatgatggctcctcccggatatccgaatatatactctgtcttttctgcgatgagcgatttgatgagcgcttccgctccgcttattttctctgttgccatagtcgttttgtacaattgggactctgtttcttagataattcgtacagcacctttgtcggccgagcttactaaggcagcataggcttgcaaggctttcgatatgtttcgtgttctgtgtcgaggggtgaatgcctcttttccccgggtattttcttctgctctgcgacgttccatttctgtttcttcgataagcaggttgatgctgcggttgggaatgtctatttcgatgaggtcgccgttccgcactaatcctatgtttccgccggcagctgcttcgggcgagatatgtccgatggaaagtcccgatgttcctcctgagaaacgcccgtctgtaatgagggcacaggctttgccgaggtgtttcgatttgatatacgaggtagggtagagcatctcttgcatgccggggcctcctttgggtccttcgtagatgatgacgaccacgtctccgctctccactttcccgccgagtatgccttcgcaagcctcttcttgcgattcgaatactttggctcttcctttgaagcggaaaatgttttcgtccactccggctgttttaacgatacagccgtcttgggcgatattaccgaaaagtacggccagtccaccgtctttgacataagcgtgttcgaaatcgcgaatacaccctttcgaacggtcggtatcgagcttgtcgtaatagttttcctgagagcccatcacgaggttgaaccggttgcccggtgcgcttttccaaagcctttccgcttcggggggacatgttccgtttcgtatcgcatactgttcgatggcttcggttaaggacagtcgatctactcgacggacagatgcgtctatcagcccctctttttcgagtatggcgagaatcgagagaatacctcccgcacggttcacgtcttgtatgtgatagtgcgaattgggtgctactttgcaaagcaccggcgacttgcgggacagggagtctatgtcttgtatcgtaaagtctactccggcctcttgggctatggcgagcaggtgcaataccgtgttggtagagccccccatggcaatatcgagagtcatcgcattgaggaatgccgcgcgagtagcgatgttacggggcaatacgctttcatcgccgtcttggtaataagcccggcagttctccacgatttgtcgggcagcttgtatgaataatcgttccctgttgcggtgggtcgctacgacagtaccgtttccggggagagccagaccgatggcttcgttgaggcagttcatggagttggcggtaaacatgcccgagcaggaaccgcaagtagggcatgcggcatgttctactcggcgtacttgttcgtcgcttatggtttcgtcggccgattcgaccatggcatcgattaaatcgagtcctttcccatcgagctgccccgcttccataggacctcccgatacgaagatggtaggaatgttgagccgcatggccgccatgagcatgcccggtgtgattttatcgcaattactgatacagatcatggcatcggccttgtgtgcattgaccatatattcgacgctgtcggcgatgaggtcgcgggagggaagggaataaagcatgccgtcatgtcccatagctatgccgtcgtcgatagcgatcgtgttgaattcggcggcaaagcatcttaatttctcgatttctttttttcccgtttgccctatttcatgcagatgtacatggccgggaacgaattgggtgaacgaattgacgattgcgatgatggggtttcccatctccgtttctttcatgccgttggctctccatagagctctcgctcctgccattctccttccgccagtgcttgtcgcactccgcaattgatgtttcataatctgtactcattaaaagaaaaacctttccgctgtgtggaaaggtttttacgattactctaatttaacattctatgagaagtaactacatacgcctttccaccttaccgactcacgacaagaagctcgctaatgaccgatagagaaatgacgtgtagtaacataattatcacaataaatattgtttatgatgttgcaaatgtataactattttgtgatataaacaaataatttgaaagaaaatatatgtttactattttaaattgcttgtatttacggagtttaatgtaataaatgaaaataaaaaacatcgtataactgtgtgattgaaacccggttaatttttgtcttcttgcttctgcctaaggaatggctggaattgaaaaaaataaagtgtatatttgcaaggttttatccatcgagaaaaaatcaagttatcggagaagcgttgaaaattcgtcgagttataaaggcaagtttaggagcgatcgtcggtattgttctggttgcgtgtagtcctacccgccatgtcccggacggtagctatctgctcgaccatgtaaagatagagaccgatgataagtcggtgaaaccttccgatttgaaatcctatttgcgtcaggagcctaatcaccgtatgttcgggttgttccgctttacgctcgggctatataatttgtcgggaaacgattcgaccaaatggtataaccgctgggtaaggaatgccggtacacccccgataatttacgacccggttttgatagaaaattctcgtatgcaaatggagaaggccatgaataataaaggatatatggctgctcgggtcgatgtcgatacggtttcgaaaggtaaacgtatggacgtgttctatcgagtctcggcaaatacgccgcattacatagacgatatagactatcgtatttcaaacgatacgatttcccggcttgtcgagcggcaatatgcctctcattcgcttttgaagaaaggatcgaatttcgatagaaatgtgttggacgaggaaaggcaacgtatttccgatatgttgcggcgcgatggcttttatgcttttaataaagaactgattacctatacggcggataccgccgaccgttcgaaagcagtcgatctcactatgaacctcgttcctgagtctgttgccaatgcttcggggtatcgtccgtacgaacggtattatatgaggaaaatctattttgtgttgtcttatgacccgacggcgaccgaccaaatcgatgttgccaatgccggtacatataagaattattatttcgtggaaggcgaccacccttatattcgacgggaaacattggtggagaattgtttcattcgtccggggttgttgttcagtagtcgagatgtggacaatacctatacggcattcgggagattgcgtattgtcaaatatgtcaatattcgcttcgagccggccggtcggaacgacgaaggtgtaaatcaattggattgttatatcttgctcagcaaggataagccgcagtctgtctcgctcgaattggaaggtactaattccgagggcgatttaggttttgccgtgggagctacttatcaacatcgtaatatcttcaagggttccgaaactttttcggctaaggtacgcggtgcttatgaaagtttgtcgggcgatttgagcggactcatcaatgaccgatataccgagttgggaggggagataggagttacttatcccaaatttcttttcccgtttttgcgtaccgattttcggcggcgtatgaaggccagtaccgaatatagtataaaccttaatttccagcaacgtcccgagtatacgcgagtcatttggggagcagcttggaaatataagtggacgaccaatcggggattctaccgccacaactacgacctgttggatataaattatgtctatttgcctcgtaagaccgacggatttctcgaaaacatagcccccgataatccgcttttacgatacagttacgaggatcacttcatcatgcgtatgggatataccttttattgctccaatctcaatccctccaatccggtgcagcgtcgcaccaatgtctatacgttgagggctgcgggagaaatagcgggcaacgtgctcaatgccttttccaaacttacctcgaaggagcccgatgggggatacaagatttttggtatccgatattctcaatatgctaaattcgatttcgattatagttttacccatttgattgacgagcgaaactctattgcttttcatgtaggtggaggaataggcataccctatgggaattccgatattttaccttttgagaaacgctactattcgggtggagccaacagtgtgcgggggtggtcggtaagaacgctcggtcccggtagttataacggcaataattctgtatccgaatttatcaatcaatgtggagatatacgcctcgatataaatcttgaatatcgcaccaaactattttggaaagtagagttgggagcttttatcgatgccggtaatatttggacgattcgtgattacgaatcacagcccggcggtcagttccgactggattcgttttataaggaaatcgcgttggcctatggattgggaatccgtctggatttcagttatttcttacttcgcttcgacatgggaatgaaagcctataatccggcggccggacaagaccattgggcaattgcttcgcaaaacttcaaacgagattctgcgtttcatttcacggtagggtatcctttctgatacttctattttatatgaggtctacaaaaaataggatacatatatttggaatatcccgaaatatccctaactttgcagcactttttcataaaaggtcggttgagtagctcagctggatagagcaacagccttctaagctgtgggtcttgggttcgaatcccaactcaatcactcgaaagggaagcaaattttttgcttccctttcgtttttatacaactttatcaattctctccctatcccatctactaaaatttcacactcctccgctgtcgtgccccgtggcattacggggtgtcgcaaagcgatataggtgcacttctctgcaatgaatagagggttatttaccctcctccctgctgtgtcccgtagtattacggggtgtttttgcaacgcaaaaatataggggaggtggcacgtagtgacggaagggttaatttaatagaggaggtagaaaataccggcagtggagttaagtctcgtccaccttttgtttatcataaatgaggtggagtgtaccacaggacgagggagaaataaaacatacaaaaattcccctgcttagcaacaagtcgagacgggcttggaatagaaataagattctttttggaggcgaattttgtagggggatttaggcttaattcaccgaaaaggaagagctttatgggtttatgtagggtgctgtattcagcaatcgttgctgtcgaaactttcgactttcacccgtttgcgcgatttgaataccagcatatccgctacgaaatagttgaacaatcccgaaataagcagggcggcaagattacaatagataacgtcccaaccgaatatcttttggaaaatgagtagaaaaaacattttcattaagaagccggctcccgatgaaagattgaacatgagaaaacgaatacagaaatcagacgtcgaacgacggccgattctacttttccatatccaaaaataagaacataggaaattgctcaatacggcaaattcaaaactgatgataggtgaaaggacatatacctcccagtagctgctgaatataaaagtcgagcatatccacagtatcaaggtatcgacacctgtgcccaatagccgactgactacgaattgtaggtaaatacgcagctttaacaccgtatctttattattttttaggagaatagggtttcaatggatcttgtttggacaaaacgcgacggtcggtgatgaattgaaccaaccatgccacgaacaagaagcaggcaatgaacaatccggctacatcgaatatgcccaatgtttgtccttcgatggtccactttatttccgagagggaagtatacatgaacaccgtgttgataagaatgacgatcaatcggaattcagttggcccgaggctgccgtaagtgagcaggaacttaccgcttaggattgtcgagatatacgtataaatagaaagaaccaaatagcccactaataccaacatcgctacatcgagcctgaacatgggcgaaagaccggctccgatacacatgatacaaatggtgacggcatcgagcgtatggtcgataaaaaatccataaacgggtctttgtgcattccttactctggcaagagtgccatcgaggctgtcgccataccagttaatcaccaacccgagagaagaaatccacaggtagtttttatctatatgagccaatatgaatcccactgcgcatacgagagctcctactacaccggtgtatgtgaggaagtccgaagtaacccatgccggttgtcgttgagccagccaaaccaaaacttttttctctgctgcattgagcacggaagtctgtattctttcagatgtttcttttcccatttcctaatttttgtacaaaagtacagattatttagcaaaccgagtaaaaaaagtgtattaaattattcatgtttttgaaagattcgggtattctgcggagagcaaggcgggtaactaaaacaagttcttgggttctgtttttatcccatgaagttgtcgtcatgccattgaccggagtcatatcgaccgtccggatagtacatggttccatagccttctttacagccattgacgaaatcaccttcgtatcggttcccgtttttgtagaagaatacaccctttccggtacattgcccgtttacgaagtctccttcgtatcgctctccgtcagtccatatatagatcccttttccatgacttatcccttctacgaaatcgccgtagtaacattccccgcctttgtgaatgaaaacaccttttccggtacgttttccttcgataaaatctccttcatagcgatctccgtcggcccagaaaaagaaacctcttccagagggtaagccgtcgacaaagtctcctctgtaacattctccgtctctctgggtatagacccctttcccggtctgtttcccgtgatcgtaatctccttcgtagcaacagccgtccgaccatgtaaaaacgcctttcccatgttgttctccgtttacgaaatcaccttcgtagcgttctccgtttgcccacgtgtagataccgcgaccttcgaatttgccgtttgcaaattggccttcgtatcggtttccgtttggccaagtatacataccggatccctcgaacttttcattgacgaaatctccttcatatcgttgtccttccgggaatgtcattatacctttgccttgtatttttccgtcttgaaactctccttcgtatataatcccgcagaggtcggtaagtgtgccccaactgggtttaccatctttgagaactcctttgaatgtaccgtccgggaggctgataccctctctcggtgtttcgctgtaataagtcatggtattcttttattatgatatcttcaatcgtgttttcgagataacgatatgcgaatataggaaaatacagtcgattttccaaatgtctcggcagaaaattatatgggtcgcgtgacggaaaaatggtcgtggcttaatttgtatatgtcttataatgaatgtattgtattcgtttttaaccacgggactgtttataccgataaccttttgttatgaatggtaaaaaagaatgataatcaaaatcaggtttcgcttgttatatttgtaacggaataaagaaaactcatcatttaaatataacgaatatggaatttttgacgaatgaaaagctcacgatcgtgggtgctgccggtatgatcggttcgaatatggcacagactgcattgatgatgcgtttgacacctcatttatgtttgtatgacccttatgctccggcattggaaggtgttgccgaggaattacgtcattgtgcatttaaaggggtagatataaccttcacgagtgacgtgaaagaagctcttacgggagcctcgtatatcgtatcttccggaggggctgctcgcaaagcaggaatgacaagagaggatttattgaaaggaaatgccgaaattgccgctcgattcggtaaggatatacgcagctattgtcccgatgtgaaacatgtggtcgtcgttttcaatccggccgatattacggggttgatcgtattgctttattcgggtttgaaaccgtctcaggtatctacgcttgcggcgctcgatagtacgcgtttgcagagcgagctggcaaaatatttccatgcggtggccgatgaaatcgaaaattgccgtacctatggagggcatggcgagcaaatggcggtttttgcttcgacgacaaaagtaaaaggaactccgctcgccgagcttatcggaacggaaaaattaccggccgaagactgggagaagatacgccagcaagtcgttcaaggaggcaaacacattatcgatttgcgaggacgctcttcttttcagagcccggcctatctttctatcgagatgattgctgcggcaatgggtggaaatcctttcacgtggccggcaggtgtttatttgtctgacgggaaattcaaccacatacttatggcgatggagacgattctcgatcgttcgggagtacattataacccggtgtatggtacgccggaggaagataaagaattggagcgcagttataagcatttgtgcgatttacgtgatgaggtgatatcgatgggaatcattcctccggtttcggaatggaataaactgaataaaaatatcgaataaacagcgttgtcgaacctgtggaatcctgttataaaaatagcgacttcttacgagaagccgctatttttatctttatattatacgggaaccggtaaatcaacgtccgaagttaaatatgtcggagtgtatatgctcccgatccataatgactttcaactcttccactttgtcgggataagtattagctaaattattgtcttcatgcgggtcttcggcaatgttgtacaactcatgagtcgggtttccgtttttgatattttgtcgaatcagtttccaatctccggctcttacggcttggcgaccgttttcctcgtggaactcccaatacaagaagtcatgttgccgttgttccccctttccggtcagagtagggagtatagacaacccgtccatcgcctcttcgcgccaattcgtatcttcacccaacaattctacgaaagtaggcatcatatcccagccggctgccatcaagtcgcttatagagccggcttcgatagtccccggccaataggcgatataaggcacgcgcataccgccctcgtacaaagctcgtttcaatcctctcagtcgttcctctgtgttgaagaaagtcggatctgctcctccctcgttatgagggccgttatcgctcgtgaatataaataaagtcttttcggagatacccagctcttccagtttatcgatgatttgtcccacatacgtgtccaatcgggtaatcatagccgcaaattgtgcgcggggattagttgctgtaccataatctccgttgtcgtaccacgggtggggctcttgaaatttacctttatacatatcgacgatactgtcttgcggctgacacagttcggcatggggaatcgtatatgtgaaataaccgaaaaatgccttgtccttattgtcttcgatgaatttcatcgcatgttcgtgtatggcatcttgcgaataacgtccgttttgatactctttttcttggttgttccacaaatactccgggtagtaagagtgcgctttacgctgacagttgtatccgtaaaatacgtcgaatcccatcttgttagcttctccgcccgaaccgggataacccataccccatttaccgaaacaacctgtcacatatccgttttgttgaaacagatgtcccaacgtttctacgttcggatcgagaggctcttgtccttcaggttgtatttctttatttccccgtattttggtatgtccggtgtgttgcccggtcatcaacgaagctcttgatggagcgcttacggctgtacttgcataaaattgagtgaaactcatgcctttatttacgagcctgttcagattgggagtcgatatcatttgttggccgtaggcctctatatcgctgtatcccatgtcgtcgcaaagcaagtaaatgacattggggcgttctgttgtggcgacagcatctctttcttgggcgaagcacaaacccgaagtaaggagcaggctgcttgcagggtatataaatttattggtattcatacgttttataaaggtgtttaaagtttgctatcgagaagtttgagtgtggtcgttttcccgttttccggttcgatgactaagacgataaatctttcgggatatttcaattccccttcgaagacggtatcggcagaaaagtaatttcctaacagttggccggagaggctcactgctttgatcgtgttgcgtccgttcagtccggttatgctcagtcgtccgtcgtagaggtgagctttgggtgctacgcttctgtctccgttttcaattcctgtgggggtttttaaaggcactcgataaaaataccaccccgaacctgttcctataccggcgttgtatagaacgactccccatgtaccgtcttgggcgtttaacagataggaattgtcgccttcgtacttgatagagtagctcccgttttcatgaccgctggattcgattgtgaattgactcccgagagtagaagcggtaaaatattctttttctaagactttcgacccggatatttgcaagttcgtccctttgtttacgatatatacccgattatttccggcatcttccaaccgccagagaaatttgtctgtttggttcgccggtttttccaccctcagtgcggtggaataatccccaccagtgttcgtatcataggcgatatatctctcttttcggttggtgtcggtgtgagcattcatgatttgataccaaatcgggtcttcggctgtgcttatttcgggggtggctaatacgggaacagcggcttcgaatatggctatcaggctcgtacttttcgttacggtaaatgtgtagaccgattcttcactcacgatttcgtttccctcttgccaacctttgaattctatggcagactccgaattttcattgataatagcttttacggtgacttgtgtccctatttcgtaacggccggcgtcgtttgccggtgtttcgataatggcagttcccagttcgtcgttgttcgatgatacgcttataaagcggtcggttctatccgatgcttccaaaacatacactacgaaatcatatacccgtccgctaatcgaggcatcggccgaggagggggttgtcgattctattcttatgcgtatgcgagtttttccgagttctgcgttttcgggtatcgctatggtctgtacgaaacttttggtggaggctgctacttgggcgggtcgtgattccttttcgaatacaccgtcgcggttccagtcggtgtaagtcgagagggtatagttcgacggatcgacggtcatagtcgcattgaactcgaaagtttcgcccgcgatcaataaggaagtctctttcgacactatggcgaaataactgccgggagagttcggttttgcatatcccaacgggtagatgacagcatcgcccgaggtcgttgccgaagagatatagcctccgttggcagatccggccggcatttggtatacggggcttttttcgctgatacgccccagccgtatcatggtttcgaaagggttcgatgaaatgtagtcgttactcgaatcgtcggcggctattgccggtattgtcattgtagcaacggtggccgctgccagaaatttaaagaatatattcatgtcttatctattggatataaatacaaaagcataggacaatataattttatcctatgcttttatatcaaagttatttaatgaatttgatcatttctccgcctacatttgcgatatacacacctttttcgagggacgatacagagatttctgttgtattgtttacttgcaagacaatctgtcccgacaaattataaacggtggtttgggtgggattgggggaaatcaagagtccggcgtgagcatcgtaataaaccttaccggaagctattccttcgattcccgatgccggagagatggcgatttcgaaatcataggcaataccgtttcttatctcgttatagaattcggtaaagactttcgagggccagtcgttggaccagggatcgggccccatgtaaacgacgcgcatgcgataggttccgggagcggtttcggccggaacggttatcgttctgtcccaaccttctgtaacattgccgtcaggatcgtcgaaagtattgtcgcctgagttattgcctacggcagcgtaaatctcgttttcgccgctgaattctttatcgttgttccagtctatgtagagtgtttggtaagaccagacgatttcaggctcgcatacgatgtctctatatccgttgttataggtgatatcctcgttatactgcttgaaattcatggagaagttttcaacaccctcttcgaggcggatcagattttcggtcttgtcgataacagctccttctacttgtggtgtatgtagttttttatattcggtgaaggggagttcttcttgggttgcgcaggtgaacagagtctcggtattatcgcctgcggtataagaaacagagcctaaataacggttctgttgattaaggtccgtgacgtagaaacgggtcatgatgggataatccttttcgacgaattcggcgacgagagttttatcttctgttccttcgtaagaataagtgtgtctgtaacttataacagtttcagttccctcttccacccatctgtaaaacatatagttgtcggctgcggtcgcttttacgataagagcttccgtttcaggaacctctacacttgtcgactcttttccttctatggataccgatccttttgccgagtctgccgattttactgagacggttttggtagccgttggaggggtgtattgagccggatagaaaaaccagcccgaggcttggtgtgttcccatttcataaacggttacaccgtaatcccatgacgtatctgcggcgttcagataagcggctcccgaaatcccggtgtagtccagacagtattgtttatcggcacattgctgttgtcccgtggaagcagatgtggccagtacccaaacagcaccctcgtctgcactcatctctaacatcgtattgttgatagcggtagcttctactggaacaacaatgcgcataccgctcgaatgaaccagtacgcagtaattgtcgcctccgtccgctttttccaaacgccagatgtaagcagcatcggttggcggtgtggttagctggtcggtacataaattcgaaccgtcccatttcataaatcggttttgtcgatcggaagccgtgaggtgggacgacatcattgtataccatttgggggattccgctgtgcttatttcgggttcgacgacccctgaaataggagtaacctgtgctacggatagatttgaaacaagtagacctgctaaaagcagtaacggattaaataaagattttttcatacataaagtgtttttaatgggtaattaaatgtgtttgtttattttttaatgatattagtaacgaacggttgtcttttatataattttattatgggttatttctaacggtatgtaatcgcttatatattttataactaatatgaaggtttaatccctagtgagaaaattgtttttttatgatttaccccataaatagtaatattatactataattaattatatatttataaggtgaatttctcccatcgactgctaaaagtattactatattggagggggaagtctgagtgaataccctcgtagaggttctcgaatgtcgcttgaaaaaaattaaaacagtttctaaatatttcgtattggattatttcttaaaaaagttgtaaattgcagcgaattttaaatttcaggttatgaaaagatatttggtcaccggtgcggccggatttattggggcgaactttttgaaatatttgttgaaaaagtacgaagaagatatatatgtggtcgttttagacaaacttacgtatgccgggaatctgggtactattaaagacgaaatagccgattcgagagtgcggttcgtgaagggggacatacgcaatgctgaattggtagcgaacatttttgccgaaaacgatatagattatgtggtcaattttgcggccgaatcgcacgtagaccgcagtatagccaatccgcagctcttcttggaaacgaatatattgggcacgcagaatatgctcgattgcgcccgcaaggcttggtataagggaaaagattccgaagggaagcctctctatgccgagggaaagaaattcttgcaagtatcgaccgacgaggtctacggctcgttgtctaaggattatatcgacccgcagccgttggaaattaccgatgccgatgtgcgcaaagtggtgaccggacgtaccgacctgcatacttatggcaagcggttctttacggagacgacaccgctcgatccccgttctccttattcggcttcgaagacgagtgccgatatgttcgtgagggcttaccacgaaacctacggcatgccggtgaatattacccggtgttccaacaattacggtccctatcatttcccggaaaaattgatacctctgattatcaagaatatattggccggtcagaaactcccggtctatggtaagggcgacaatgtgcgcgactggctctatgtggaagaccacgctaaggctatcgatgccgtattggaacgcggccgtatcggcgaagtctataatgtgggcggattcaacgaagaacagaatatcaatatcgtgaagctcatcatcggtattattgcccgtatcatgcgggaagaaccggaatatcgtagggtattgaagaccgatgtgaagaatattaacgaggatttgattactttcgtgggcgaccgtccggggcacgacatgcgttatgccatcgatccgtcgaagattgcccgtgaattgggctggtatcccgagaccccctttaccgtggggatagagaaaactgtgcgttggtatctcgatcatcaagattgggtggacgaagtagtcagcggcgattaccagaaatattacgaacaaatgtacggcaatcgttgattgccctaataagatacgaacgatgaaaggcatagtattggccggaggctccggcacgagattgtatcccatcactcggggagtatcgaagcagatgcttccggtgtatgacaaacctatgatttattaccccatatcggtattgatgttgtctggtattcgtgagatacttattatcagcactcctaccgatttgcccggattcaagagattgttgggagacggcggacagttcggcgtgcgtttcgagtatgccgagcagccatcgcccgatggactggcgcaggcgtttatcatcggggagaagtttgtggggaacgacaccgtgtgcttggtgttgggcgacaacatcttttacgggcagagctttacccgcatgctgagacaggccgttgccgatgccgataaaggaatggcgacggtgttcggttaccgggtgggcgatcccgaacgttacggtgtagtcgagttcgacgaaagcggacgggcgatcagtatcgaggagaaaccggtaaagcctcgttctaactatgccgtggtcggtctttatttttaccctaatcgggtcgtggaggttgccaagcaggtgaaaccatcggcacggggagaattggaaataacctcggtgaatcaggtctttctccaatcgcaggctcttggcgtacagttgatgggacgaggtttcgcttggctcgataccggtacgcatgaatcgctgtacgaggcatcgaactttatcgagaccatcgaacaccgacaaggactgaaagtggcctctttggaagaaatcgcttatcgcatggggtggatcgacaaggaacatttgctcggactcgccgagccgatgaagaaaaaccagtatgggcaatatttgataagactggcgaacgatgagctttgaccgggtgagatggatcgagttgcccaaagtggcagacaagcggggaaacctgtcgttcatcgagagtgcacggcatattccgttcgagatagcgcgtacttactggctgtacgatgtgccgggtgacgagcatcgcaacggccacgctttcaaagaacaggaggagtttatcgtagccttgtcgggcagcttcgacatcgtgttgaatgacggcacggagacccggcgctatcacatggcacgttcgtattatggtttgtatgtgccccgcatgatgtggcgcgagctggataacttctcgaccaattcgctggcgttggtattgtcgtcgaccttgtacgatgccggcgattatatagaagattttgaagagtaccgcactttattgaaagggaggaatgatgagtaaaagagcttcggtggacgattgccgactgatacgattgcccaagcacgagcgagagaatggaaacatcactgtggtggagaatgacatcgacctgccttttgccgtgaaacgggtgtactatctgtatgatgtgcctggcggagaggaacggggcggtcattcacacaagcaactttaccagttgttggtggcggccggtggatcgttcgatgtaattctcgacgacggcatctccacccgtacggtgactttgaaccgaccctcctacgggctgcttatcgtgccgggtatctggcgggtactcaataatttctcgtcggggtcggtctgtttggtgctgacttccgattattacgaagagtcggattatattcgcgattatcaagagtttaaagaaattagccgatagatgaaatatccccaattatccctacgagaaaccaatgctccttatatggaggagatgaagaccgccgccgccgaagttatcgagggcgggtggtatatccgggggaagtacgtgtcccggttggaagagcaattatgtgcatatctgggttgtcgctatgcggtagctacgggaaacgggttggatgccttgcgtttaatgttacgtgcatacatcgagatgggtgtcatgcagccgggcgacgaggtgatcgtgccctcgaatacctatgtggcttcggttctcgccattaccgacaatgggctcgtacctgtgttcgtcgagccgtcgatacacacatacaatctcgatacttctttggtggagcgggctgtaaccgctcgcacgcgggcgattatggtcgtccatctgtacggtcgggtttgttgggacgaatgtctgaaagacgtagctgcccgttacgggttgaaaattgtagaggataacgctcaggctttcggtgcggtttcgccggtggcgggattgcagggctcgtttcataccggagctttgggtaatgccgccggattgagtttctatccgaccaaaaatttgggcgcattgggcgatgcgggagcagtgacgaccaatgacggggaactggccgaagtggtccgagcattgggtaattacggctcggcagagcggtatgtgaatctttataagggggtgaacagccgcatggacgatttgcaagctgcattcttgtcggtgaaattgaaatatctcgatgaggataatcgccgtagggtcgctgtcgcaaaggtatattccgaacatatacatggcaaggaaatcgtacttcccgaaccgggaggtgagggggaacacatttggcatcagtatgtcgtacgatgttccgagcgggatcggctgaaaagctatttggaatcggaaggggtgggcactctcattcattatcccatacctccacacaaacaacagtgttatcgagaatacaatcgattgcctctgcctattgccgaacagcttgccgatgaggtattgagtctgccgatgtcggcctatctaaacgaatccgatgtgcttgaaattgcaaggatcatcaaccgattcgatatgtaatagcgcgcagggggagtgtataattcccaaacatctttattctactattgttttaaccccctcgccctacgggcactccccctatctcatctgcgatgagcagggggagaggattgaaagtggcgtttccgtttcggcataaggatagcattgtgcacttctctcttgtgctgtgaaagcaataggggagacaccgaagaaacgaaagtttcagaggagaggggagagaaaggtttcatagtaatttctgattgagagattaacccctcgtcactgtgtgccacctcccctatatttttgcgtggcaaaaacacagaggaggaggtttaacgcccttctgttacatcgttttaacaaatgagataattgtatttacccttctccccagccgtgtcacgtagtgacggagggagtgaaaacagcctctcatcagtcggtttatatcggacatttaacccctctgctctgcaaaacaatataaggagggtgaggcactaatccgtttcttttgctgtggatattgttctccttccctctactatattatttctgtcgcacgttataaatttgtgcaggagagaaaatttctttgtggactatttcaacgcttttatagcggcttcatagtcgggttcttgtgcgatttcggggacgagttcagcgtgaatgacttttccattttcgtcaatgactacgaccgcacgggccaatagtccggctaacgggccgtctaccatttccacgccgtaatcttttgaaaattcgggcgaacggaatgccgatgcggcaattaagtttttaatgccttcggtcgtgcaaaagcgtgattgggcgaaaggtagatctttggagacggccacgacggtcgtattgtccagagatgctgccagctcattgaatttacgcaccgaagtagcacagaccgaagtgtcgagacttggaaagatgttcagtacaatgcgacgtcctttgaggtcgtgacaataaagttccgtcaagtcggatcgagtaagtgtgaagcagggagcttggcttcctactttcggcaatttaccgtaagtgtgtacgggtgtgcctttgaaagtgattttttccattgttgttaatttatagatgaaactatttgtttttctgcgcttgtatgggccggtcgtgtagtatttgcctgacggcgagttcgagttcttcggccagtagcggggaatatcctatttttacgaatcgtatcgtgccttcggggtcgagcaggaagagggtggggtagcctgtcacgccatactcgctggctgtttttccggtatattccagtatgatggctcccgaacggttttctatgttctcgggttgtttctctatgtagagtataaccggcgtcagattttcttgcaaggatacggattcggctatttgcagggcttgtttgcaaaattcgcctcgttcgtcgaggaataagagcaggcagttttgtccttccaactgatcggaagaaaaccgatgttcaccccatttgtgggaaaactccggacttttttgtcctacccggtcggaggctgcataagtgccttcgcggaatcggaggaatatttctccgtaatttttcagcaggttggtctcaccgaaatagtcggaggggaatttcgtatctgtatcgtttcccgaatattttacagtaacggtttgcgaacctaaatgacccggattattttcggtttcccgatataggggcatcccgtcatgggtgtcgaatgtatagagtatggttcgggacaattcgccctttatggagtcattcacgagtatggcgtcgcacagacggtcctgcacgagcgtgtcggggaaaaattgtacgagacaatcttttttcccgacgaatgtttttaattgtcgggatatttcagccgggaaaagttcggtgaacagtcccgaacggtgtactcccggattgttacctttatgtgcgaacggttctttgtcttcgcgatgatgatattctcgtagccgatcacggtcgaaccggaagtaatcgccgttgtcgtaagccataaaattggcatacgggcatgtatcgttctcggctttgtaatcgattaagtatgaatatccgcaaagtgtgtcgattggattttttcgataggagagttctgcccgatagtttatttccgaatcggtgagtggtaatgtcactgtatatgtgaactcggtccgacagttttgaatggaatcgagtttatgccatattttgtccggggattgtcgagccgaaccggggaggagacccatgaataatattccaaagaggagaacgaaaagacggtgtggcataattttatactgttatatctattgcaagataacaattatttctcgcattttgttctcggtctttacatttttttcaaggttgagaatcctctaattgcgggtgagccggattgtttttctctttattttctttttgtttcagataacgggcataaccggctcttaaaaagtcgtctatgtcggtgggcaacacatcggcttcgggagggtatgtctcgtcgctgtcctccaacaggtcgaaaaggttactcgaattgtcgggcgtgtaatccgtttcttcgctttcggtattttcatcggttaccggtatttcgtcaatatgctcttttcgctttcccgatttctttttaacgggttttgtttcatactttttggcgtagcgttcgagtgtgttgatataccccatcaatgttttcacttcgttgggttgtgtcattacatctaatgtgagcagtaattcgtagtatcgtaacaggattcgataccggagtgtttctatcttcaaccgttgttctttcaaaatttgttcttgtgtttccatacttctgtttttttaggcaaatgtatggtcttgccatctttgatttatggcatgattgaactttcttcggagggtttgtttttggaatttgtgtgccttttgttttaaccccctcgccctgcgggcactccccctatatttccttatggaaacactgctttccttgccgacattttctaatctctatattaaattaacccctccgcctttcagcactccttctatatttccttacgaaaacactgctttccttgccgacattttctaacctctatattaaattaacccctccgtcactgcgtgtcacctcccctatatttttgcgtagcaaaaacacagaggaggagggtgagagtaaccctttatttattgcagtgaagtgcacctatatcgctttgtcacaccccgtaatgccgcgggacacggcagggaggagtgtaagagtacccctctattattataccgatagccatttgccggtctcttcgggggtgaagcctctttggtgggcatagtgttcgcgctgggtttcgtcgatgtgcccgatgtggaagtagcgggcatcggggtgtgcgatgtagagtccggcgacagaggcattgggcatcatggcgccgttttcggtgagggttattccgatacgcgagaagtctaacgctctatcccaatcgaagaaaagggaatggtcgggcagggagggatagcctactgccggacgtatccccctataccggacggagaggagggactgcaagtcgaggtcgggttcatcgggggcgtaaccccaaaattctcggcgtatttgccggtgcagccattctgcggcggcctcggcaagacggtcggcgagggattggagcaggagggcggtatagtcgtctccgtcccgacgcaagagctctatgcgacgttgtatctcgtttccggcggtgacggcgaatagtccggcataatcgggtttcccgtcgttggcggggcgaatgaagtcgcttaaagaatagtagcgggcattggcttcggatttacgcacttgttgccgcagacagggtatgtcgaaatcgctgtcgggtagccgcagtcgtatgatattgtcgtaagaggcggcttcggcaagtaggtagcaggcttgtggagaggtgttgttttctgcttcgaggatgtcgagcagacgattcgcctctttgtagagctgcatggcttcggcggctttggctctctcggccgatgggaaagatgcgagccagacggctttgcagtggtcgcacccttgcatgtcggctatggaggcatagcctgcgcctattttccatacggagaagaatgcccgccagttgatgaaaggtcgtatgtcgccaacagtgacggggacggtgtgcaatcccatttgccgaggccggggggcggtatatgtgtcccaatctatgtagggggcgtatctttcggcttcggatagggtgactaaatcgaacggtttcaaggagttgcgcagtgcttcttgttcggtgcgtatgctgcggataaactcctcacgagtttggggattgagcagttgtgcggcgatgagcgggttttgcgatgcgtcgccggcatgtatgaccgcaccgctgtaacacggggcgattttgacggccgtgtggagtttcgaggtggtagctccgcctatgatgaccggtgtgtgcagtcctgctttttccatttcggaaacgacgtggcacatctcttcgagggagggggtgatgagtccgctcaaccctatgaaatcggcttgttcggcaatggctcgctccacgattttttcggccggaaccatcacgccgaggtcgattacctcgaagttgttgcaggcgagaatgacggcaacgatgtttttcccgatgtcgtgcacatcgcccttgactgtggctacaatgaattttccccgtttggaggtttctccattgcgggtattttcctgctcgatgagtggttgcaatatacccactgcttgcttcatggtgcgggcgctcttgacgacttggggaaggaacattttcccgtcgccgaaaagttgtcccacccggttcatgccgtccatgaggggttgctcgatgacggcgagtgccgagccgtattgacggacggcctctgcgaggtcggtttcgaggtgtgtcgatatgcctttgacgagagcttgtttcagtcggtcggcgacaggttgccgatgacggtcttcgtcgatattgttttcttttttgactgcttcgccccgatgtttctcggcgaggtcgatgagacgttcggtcgcatccggccgacggttcaatacgacatcttcgatgagcgcaagagtttcggtcggtagatcgtcgtaggtaatcgatgtggcgggattgacaatcgccatgtcgagcccgttgcggatagcatgataaagaaagacggcgtgcatggcttcgcgaatgaaattgttgcctcggaacgaaaaggagaggttgctcacgcctccgctcactttcgctcccggcaggttttcgtgtatccaagccgtagcccgaatgaagtctaccgcatagttgtcgtggctgtcgattccggtagctatcgccaacacgttgggatcgaatataatgtcgcaaggcgctaatcctgcttcttcgatgaggagtttgtaagcccgggcgcagacttcgattttccgttcataggtatcggcttggcctttttcgtcgaaagccatgacgactaccgccgctcctaaccgtttgatttcacgggcatgcgcgaggaatgtttcttctccttctttcaggctgatggagttgacgatggctttcccttgcagacatttcaagccggcggagataacctcccattcggaagagtctatcattacaggaacccgataaatatcgggctcggagacgatgagattcaagaagtctaccatctctttgcgggcatcgagcatagcatcgtccatgttgatgtcgatgatttgtgcgccggcctcgacctgtttgcgggcgatgtcgagagcttcggtgtagttcttttcgtgaatgagcctcaggaatttgcgagagcctgccacattgcagcgttcgcctatgttgacgaaattgttttcggggcagacaacgagatcttcgagcccacagatgtgcagccggttgtctttcgcgatgggacggcggggcgaggcgttttgtgtgatttcccgatagcgggctatgtgctcgggtgtcgttccgcaacaaccacccacgatatttaccagtccctcgtcgataaattcttttatttgtgcagccatcgatgcgggcgtttcgtcatattcgcccaaccgattgggcagtccggcattggggtaagcactgatgtaatagggggagagcgatgccaaccgacgtagatagggtttcatttctcttgctccgaacgaacagttcaaacctaccgagagaatttcggcatgggagactgccgtaagaaaggcttcgagtgtttgtcccgatagcgttcgcccgctttcggtgactgttaccgaaagcatgacaggaatctctcgtcctgtcgctttcatagattcctgtgcagcgaaaagggcggctttggcattgagcgtgtcaaaaatggtttcgatgagcagaaggtccacgccaccttctatcaaggctgtgatttgctcccgataggctgtcgcgagtgtgtcgaagtcgagatttcgcaaagcgggattctccatatcgggagacatggaacagcttttgttcgtggggcctatcgaaccggccacgaatcggggtttatcgggtgttgaatagtcgtcggcagccttgcgggctaggcgggcggcagcccggtttatttcctttacctgactttccaaacggtagtctgccatagatatggcgttggcattgaaactattcgtctcgatgatgtcggctccggcttcgaggtaggcacggtgtatctcgtcgatgaggtgtggtgcggtgagacagagcaaatcgttgttcccttttaattccactgccgaatcggggaacaacgaacctctgaaatcttgctcgttcagtccgtaacgttgtatcatcgttcccatagctccgtcgagaatgagaatgcgttggtcgagtagttgtttcaatgtctgcatatatctcggtctatgattgtcatataacgaaagataagaatcggataaaatgaatatgttcgttttttttgccgaatcgtagtcagcttttcgcatttgccgaagatacggaaagcagggaacagcgataaacaaaaatctcttttccgacttggctataccgaaccgtgtcctatcttcgcagttacaaatatagggataattgttgttttgtctaccgaaatatttgttgtttgaaatggggtatgcagtggattattctatttttgaccttattttgtagaggaaatatttgaattttcttttgtatttagatataatgtttgtggtctgctgattcgtgtcacagaaggcaaagggtgtacgccggtgtaccggacgtatatttgttcgaaagaaaatcgaggcgaggagaggccggtcgtctgtcgttcgataaaatgatcgctccctgttatttcttgtcggatttctttccggacgatactttatcgggatttttgttgatgaagtctttccagctgttgtagcttttttcgagatgaggccggttggtttggtagaaatggcagagagcggcagccaatccgtcggtggcatcgagaaggggaggcatattttcatcggggatatgcagaatgcgctgtaacatggcggcgacttgttctttcgatgcgcttccgtttccggtaatcgacattttgatttttagcggggcgtattcggtaatgggaatgtcgcgggagagcgcggctgccatagcgactccttgcgctcgtccgagtttcagcatggattgcacgttctttccgaagaatggagcttcgatagccatctcgtctggaagatattgttcgatgaggcctaagacccgctcgaaaatgcgacgtaatcgcagatagtgactttcgaatttgtttaattgaatcacgcccagagtcatcaattcgggggtgttaccgacgatacgcaggactccgtagcccatgacgttggtcccggggtcgatgccgataataattctatcgtttgtcgtgttcatttataagtcgattacttccaatagggtactgaatcccagcacttgcttgccgaatttcttttgcatatcgcagagtagtgtttctccgcactcttcgtgccaacgttcgagcgtatcggtatcgggcgatttgaattgcagggaaagacttatgccttcttcctcattctcagcgaaaatacgggtcagttgtggttcttgtaaacctccgtgttccagtacagccggaatatagaaattttttaaccaacttataaattcatctttccgagagtgatcggcgtggtatgtggtgttgaatataatcatagtggtatggggttatcttgttgttcggagaaccatattattcttttgacaaaggtaaaaaaaatgggggcaggagccaaatttatttggctcctgccgaatgcctgttgcctcggtctatcgtgaaggtaaaaaaacttctcaatattttgtacagtcgtaaaaatagttttatctttgcaccgcattaagggggtattagctcatctggctagagcgcgacactggcagtgtcgaggtgagcggttcgagtccgctatactccacatcgttatccgtcttttgaggtacaacagtttattccccggtaaaacggggtttcttttttttatggggtttcaaaagagataatacaaagcaataggggtaatcacatagtttctgtcgaatgtggcttgcaactattgtatgcttttgctgtactgctcatcgagttgttctttatctgtatgtttcatgcttttgtgcgtatcagacaaaaccacatggacagtcttcacttggtcgtgtgtgattttccgtatatattccaactcctctcccccagaaacggtagtttctgggggagaggagttgaggaaagtttcatagtaatttctaattatgagattaacccctccgtccttcggactcctcccctatatttttgcattgcaaaaacacagaggaggagggtaaatacaatccatttcattcgttaaaattcgggtctattcctactaaatttctactgagttcgaacaaccgtactttatacccgatcaataaaaaaatcgtatcagcttatatagaataagctgatacgatttttaacctattatgatctttcggggttatcgaacgaccggtatttttacattctctcggcttccatcggcatgtacaatacaacaaatataaatgccggtttgcaaattgtcaaggctcatattcgtcgtataaccatcgacattttgcattttcattacagcgccgttcatattcaccaaagatatactcgataaagctttgtcagtttgtaccaccaagtagcctccatatgtataaactactgtcgaagctaatgtttggagttctacttttgactcccggtcgttattcagatatactggtatcttcacaattctacttacagcatcgttattggctaacacgatttgtgcttcatacaaagtatttctctgtaattgagttgcatctaatgatacggtgagcgtttccataacagaaggagcgatagagaattcatatttatcaagcgagagccagttgatagtcggggtgcgattacccgttacattcgcgcgaatacagaagttactatttaaacctaagtctcctgctgaccaccatgtattgccaagtttaaccatgtcgccgaagccattttgtacatgaccgccgtcgataccaatcacaaagtctgtcggttcaaagccatctatattaacacctatccataaatcggtattccctatcgtcagaggttgttcgagcacaatatgattccaagactgtgctattggggaaaaagtctgtctcatcaattcatttccggcatttgactgtgagccttgaccgaaaattaccacttgagctttgtcaggtacgtcgtttatatatacatcgacactactgatttgcatacccgacaatccagcaagcatattgcccggaaaatactgtgcatatacagccgaagaaccaccgctgagcgatacttcgctttcgagcccgttgtcatagcgcaatacgaattctgcctgcgactcggtttctttcgctttaaccgaatgggatttcgcagactttgtaaatatccaagaaggtttgctattttttgtagcaaaagccgactgcttgctgcccggagagtgaggtagagcataaagtaccgatgctgttcctgtaagctctgcactgccttcgttctttatttccagcgttaccggtcgtacgtcgaacgattggtacgaatcgatgatacttaatccgggtttaatgatcggtgaattgtcggaatgttccacgaccagtgtatagtcttctgtttctccataaccatattgaccgcaagcgctaagaatgtcttcataagaagctatgattcgtaggcgtctttctcccggcacgactaccgcctcgtctggaatcgatactttaatagttcccttaggaagataaccgataaattcgcccgcttcatcgaacgaaccgtttccattccaatctacccatgcacctatatataaacttccgccttcacactctacgttcaaatctaatacttcaccgggtttaatgcttgtcttcatatcagaaaaatcgctgtatacattaccttcgcttgggttgttaatgcttccaattttgactgaagtaatatattcgtaacttgcatccgtcgaatacgattcgcaaactatcccttcttccctttttgtaatagagaaaaacatggattgatgggctatttgttcatcgccttccgtgacattgcgtatttcgatattatgtttacccggttgtgaacaatcgatccgttggtcaaacgtgtgtttgtagctctccatagaagctatcgtcacacccagttcttcggttgccagtaatttatcgtctaaatataattgaagtttcgcattggatatagcttgctcaccgatattcattacttccacttgtaccttttcatatttgtcgcttgctgtttccaaaggggataataaacgttcgaacttcaatgctttttgcgcaatgtagtcgccgtcgcccgttaaacagtaacacatggataactgagaggtcatatattcttcgtaagcctccatccaaattaaacctattccggggacattgctacatgtgaacacactgaaagcacaattatgcgtttcgttgtctactttggcggctgctaccgaaaagaaaccgctttctagacagattgtttcgtccaattcaaccgaaaattcgtaaatacgtgccaaatcatcatattcgcttgcactcactccggtgaatttgcccaagacatcgaattctttgcggtagacctctttgccggggtaaccatcggctcccatttcataaaatgccacttcaaaacggatcggttctgtcatttcgccattttcatcgatgccgccacggtcggcacaagacaaccaattataattttcttcgtcccaagacaagaatctccctaaccagcgaattccgttcactttctgatagcatccagaaaaggattggtaaaatttggtagctccgtcggcacgacccatatcggaactttgttgtcccatatagtcggcatcgctactaaatgctcctgagaggacggtattaggaggacaccccaatgcatcgtcaacgctattgcgcggttctgccttcaaaaaaacattgttttcgtatacaaccgctactttttctttttctccaaatttacttgcatgctgttcgccaaacacattcactgtaaacaacattacaagcaacacgctcatgtaaatctgtttcattttctttgtctttttaattagtttgatttttatttaattatgagagcgcaaaattataatattataaacaaaatgaagaataaaaagaactttaaatgtttttttcttaatattgtatttgtatacaatataaatatgtctgtataaaaggaaaggtatgtacaaaaaactcttatgaaaccttatttatggggtaagttttttgtgtaaaattgtatgctgtctaacaaatttctgtaactttgaattttaagaacgataatactaatcgttaaatattataattgagtattatgaatagatgtttttatcactggatttctaatatttaatgaaatagtttatctctcatgttgggtttacgtcgctttctgctttttttcgtaagcgggaaatctatgatatgggtatataacaattatcgtaaagaaaataataaccataaatcgaaatgaaggtgaaacattcgagattttcggtcggagtgatcctgtttgcattagcgatgcttccgacaatggcgcaagaaagagcagcccaaattcgggaaaaattgttgaatcggaatctccactctgtaatcgtggtatcgcatcgagcagactggcgtaatttccctgagaattcgttggaagctatcgagagtgcaattcgcatgggggtcgatgtcgttgaactcgatttacagcggacgaaagatggaaaattgatattgatgcatgattctaaactcgatcgtacgacgaccgggaagggtaaggtctcggattggacgctcgattctattaaaacattgcggttaaagaacggttgcaatatcaaaacaatacacaaggttcccactttggaagaggctttacttgccgcaaaggggaaaataatgattaacttggataaagccgaccgttatttcgaccaagtttatgaattgttgcaaaagaccggtacgaccgaacagataatcatgaaaggcagtaagccagcgaaagaggtgaaagcccgattcgggaaatatctcgatgaggtaatttatatgcccattgtgaatctcgataaagaagatgcaaaacgacagatagatgtatttgtcgaggatatgcggccggccgctttcgaattgttgtttgtcaaagacagcaacccattgccccgaatgcttgccgattcgttgaaaggggagtcccttatctggtataatactttgtgggacacgatggcgggaggacatgacgacgacatgtcgcttgccagtcctgacgaggggtacggttatttgatcgatgtactcggctgtcgtatcatacagaccgaccgtccggcatatttgctcgattatctgcggaaacgagggttacacgattgatttttgtttattgtgaaaaaataaatccatgaagatttcggaatcttcatggatttgtgagaatgaatagaagttttatttattcccagagatcgggtatgggagagtgtcccacggcgttaggcgcttgatggaaaggtgtttttgtaccggaatgtatttcatatagcgatttggctgttttgatagccgcatcgaccatatagggatagggcctgtcggtaacgtcgataaaaccgcaattgtaattctccccgtcggtgcgtccgttgatgttctgatcgatccatcggaaccagcctgtaccgatgagccctcggtgagcaaaggcgttttcggtataataccgaaaagcatctcctctttctttttgtgagttcacttgccatagggattgtgcgagtcctctgtcgactgtcccgaagtggtactccccgataatcatcggcaagccagagatttccaaagcatgattcattttttcgtggtcgggagatagagcgtagcagttgaaactcaaagcatcgaacgactctttactaattcgtagcaattcgtcgtctaattgctctatgtagccatatcttattcctaagttcagatgattgggatcgttcttctttaacgatttggatatggctttcatgagtttctcgaatgtattatatataaaagttttgcgggagtcgggtgtatcgccggattctttcagaaaattttgtaattctgttttgatggggcgatcttttccatttagaattaaggaacacaggcgattttctttcgaaatccaagcgggttcgtttccgatgaaatagcctattaaccaatgattgtttttgtattttgccacattacgggcaatcgcttcgtctatctttttttcaattccgttgtcatatacgtccatcaatcccatcagttcgttttcgaaccctatgttttccaaaggtagaatgaatgcttttcgattcttgtcgtatatagttttatccgaccagtttgcaagggtattcaatccccacttgtccattcttttgattgtcatttcggcagctcggtcgagataattttttccgtatcgacgatataggttccagataccgaaagaggctgtatgtgtttcgggcgatacattctcggattcgacgaaaagttctctgggcggaagttcttgaaacatatttgtgcatttgtcggtgtttttcgtgtagtagtctccgacgggggcgacgcaatcgaccccataggagaggaataaatatccgtccgggtcgatgagccaccaacgatcgtcgatctgttctgtcctgaaaaagcccgtcgattttactcgtttgttcaaatagcctccataacgggaatagttgaaattttctgtttcgttaatttcggtttcttcttgcagccattctttttgaagttgttcttcggagtaaatttttccttcatagtcgcccaagttccattgaccgaacttgtcgaaagcgggcttattctctaagtacctgtcgccgggatcgtcttttgacaaagcgatcgatcgcagttcgatcgtagggttatcgataggggctctcatgcgtatgcctattgaatctactcctgtcaaagggcctcgttttcctcccaagttgatccagcctgttattctcggttgattggaagttgctgctatatcgtgtttggcaacgggtagttctctgaaaaatctcagtggaatggttaatttgttccatgcgttgggaacatatgatataagtcgtagttcgttgtatcctgagtcggtggtgaatcctaattgaaatcgctgtggcgtggtggaacgaaattctatggttacatagtcatactcgtcccaatcggtaggtagttggggtgcgatgtcttttatcgcgatttttttacccgacacgattttcttgctgtcgaattggaattttacagaatcgttggtatggcatgatgtcaaaccgagaacgagggaaatgattccgtaggataacagtctgtttttcatgattgatgggatttgtgatttttatttttttcgggaagtggtatggaatattgaatgtcgttttcggcgaatactcgtacgtaatctacatacatatccgatgcattcccgaaacgttcgaggtcgataggccaaccgcttattcctccgatcgcatagtttatcaggaagaaaagcggtttttcttttgatatgtcgttcgttggatgcctcagtacttcgataccgtcgaaatagtatatcgtttcgtctcgtcctacatatagaccataggtatggaaggtggtggaccaatatgattttccacccagttccatgatgggaactcgtttattaaagcgttttttatatgtcccatcgggttctttttgtccccagaaatggctcgtgatggagtaacccgggtggttggggttaccttttcctacccctccataggcttcgacaatatccagttcgtctccattgatgcctcggtcgatgctggtgagagtccaaaatgcaggccaagtaccgggtgcagactgggcggtaaacctacattcgagataacagggggcttttgtgaaaaatctttcaccgtccatatttacagacgatattagtcctgagcttccttttgttccggctcttttacgggctttaattttcaaataggtgtcgacttgttcgaaaggattatcaggaccgtcgacatcggaaaatggccagccgctgaaatctccgtatcggggcttgtgagcgcagtaccgggcgtttttgccgtcattggatatggataattcattatcgaagtcatcttcaaatacgagtttcagtcctttggcctgagagggaacggtatccggtataccgtaattccattttttaccggctttgttgtagagctgtaactcaaatacatcttttttcccctcgttgttacttgcgtatatgcggatatttgtagggccgtaggggaagtcccgggctggaaagacgaaagagaccttttcagctccttttgtttcaattcctcccggggtgaggtttacatcgtgcccccatttattgggttgtcctgtcgtgggttgttgccaacaataagcatatactcgattcattcccggtgctctcaatgtgatttttgtgtcgtcggtgataactgtacgtaatcgaggtgtgattatttcgatcgatttcgtccacttgtcgtgagtcgtatcgtttcggctgaaattgaaatcggcatagatgttttgattgtgagatgtctgagcggttataaaaaatatattcagaatgaacagtattacggtgtattgccaaagattttttcttgatttcataggttgaagtgtcgtttaactggtaatcagatgtaagttcttttttataaagacgataaagagagctttttgtgtactactttatcgatgtttttttgttcaaaaagggctttcctttctattcgtaatatgtcattgtatttcataacggggtttaacgaaggggtgagacgggttcccgaaattttcgaactgtttttggaccttctcatggggaaatgatgtttacaaactgaaaagcgagaaggaatgtttagctctttttgtatggagtttggggaaattgttagaaatttatatgcaagaattgacttttacggattttttgtatctttacgcctcgtaatttaaatgaatagaatatgaaaaagattagagctgccattgtcggttatggcaatatagggcattttgttttagatgctttgcaagtcgctcctgattttgaaatagcgggtatagtccgtcgtcgtgtttcggaggttcccatggaattgtcggcttatccggtagtgtcttctctcgacgagttgaaagatgtggacgtcgctattctttgtacgcctactcgcgaagtggaacatttcgctatcaaggctctcgaaaagggtatacgaaccgtggatagtttcgatattcacacacagatatgcgatttgcgcaaaacgcttgatgcggcagcgaagaaatacaattcggtcgctattatatcggcgggttgggatcccggaacggattcggtcgtgcgagcccttatggagtcttgtgcccccaaaggtatcacgtatactaatttcggacccggtatgagtatgggacatacggtcgctgtgaaggctatcgccggagtaaaagcggctttatcgatgactatacctttgggaacgggtatacatcgccgtatggtttatatcgaacttgaagagggttatacattcgaagaggtggctcacgctataaagactgacgattatttcgcccatgatgaaacgcatgtcatgcaggtggagagtgttgatgctttgaaagatatggggcatggggtgaacatgactcggaagggtgtttcgggaaagacacagaaccagcggttcgagttcaatatgtctatcaataatccggcattgacagctcaggttttagtatgtacggctcgtgccgctatgttgcaacgtcccggttgctatacgttaatcgaaattcctgttatcgatttactgtatggtgatcgagacgagttggtgcgtcggttggtataagctaaatgaatttgtttattcggcaggattgtaacaaacaatagaaggggaaatggttttatcattttttcttctattgtttttcgtatctttggttgggttaaatataggctgggtcttagcaaatagatttgtttttatattcggcctgtactatctttgtacatacgaggataggttgcggttcggtatagccaaatcggaaataaaatttccgtttgtctctgcactcacctttcgctatctttgttggtacgaagataggttgcggttcggcatagtcaaatcggaaacgaggtttccgtttgtctctgcgctcaccttgtactatctttgcctctgccaatatcggtagggttttatttttactaaaatatgttgactgaatttattacatggactgctaatccggctctttacgacggctttatcgagatacggtggtacggattgttttttgctatcggttttattgtcggttacaacatgatggaacgcatgtttcgtcatgagcaggtgaacctgaaatggctcgattcgttgtttatttatgtggtaatcgcaacggttttgggcgctcgcttgggacattgcttgttttatgcatgggattattattcgcagcaccccttagaaatattgaaagtgtgggaaggcggtttggcgagtcacggaggtgcgatagggattattatcgccatttggctatattcccgacgggttactcaccggaatatgttgtggacttttgaccgattggtcgttccggtcgctttggtcgctgcgcttattcgtacgggtaatttgatgaatcatgagatttacggacatgtgacgactttgccgtggggattccggttcatacagaatttatcggagtggatgaagggtgctgcccctatttttacggaaccgtcgcaccctacccagatttatgaggctttgtgttatctgcttctgttcggattgcttttgtatatgtattggaaacgtaatgcggaggaacgggagggtcttattttcgggacctttttgataggcatatttctacctcgtttttgtatcgagtttatcaagaacaatcaagaggtgttcgaggagactatgttgttgaatatggggcagttgttgagtattccgttcgttatcgccggggtgtggttggttattcgtgctttgtctcgaccgagagtgccgattaaatttgcgaaggagaaaaagaaatagattgtacaatttttctatttctaacccctcttctattgctttgcgactccccgtaatactacgggagacggcaggggaggagtatagaaactttacaacaacgttgctatactgttttttaacccctccgtccttcggacacctcccctatatttcgctgtgcaaaacacaggggaggaggattgaaaagctgcctttttcccatgctgttttgtgacactccgcaatgctacggggcacggcagggggggaggagtatagaaatcttacaacaacgttgctatactgtttttcaacccctccgtccttcggacacctcccctatatttcgctgtacaaaacacagggaggaggtttaaaatatcttcccaatagtgggacataaatccttattctaagagtcgactttcttattttcagaatatagggaggagggaaattctttttcctttatggtctagtatttttatgtggcgaacgggagctatttaacacctactctccctctgctcgtcgaagatgagatattttcgttttaaccctctcgccctgcgggcactccccctatattcgcttacggaaacaccccgtaatgttgcgggatagggcaggggcgaaggtggtgggattcttgtttgccaagagaaatcttatagccttatctgcaaaaatcatacgaaatttcctatcggcctcgaagtagaggcggagtgtcagatatggttttttccctttttcggctttcggattcaccggaaatcgccgaaatcagtaatcgtattcgagcgtgaaatcgtctaagaagagtacgctaccgtcacccccggtgaaatagtcgccatatttactagctgatgctactactacgatataggtgggaatccggtcggtatctcgatattcgagttcaagagtgaacggtgtgtattcggttacggattttccgctgtacatatcggcataagcgataatatgcggatcgtttttatcgaatagtttgcggtcacttggttttgtgcgtatctcgaccggttcgctccaatccccgagtgctatgaagatttggcaggtatcgggttgtccgataagatatttcatctcgtcgttcgatttgtttatctcgaccgaggtgtatttgaaatatccttttagccgtgtggggcgttgggtaaattgttttccgaagttgagcactccgttggttccttctgtacggaggtaatttcccgtgtacatattcccggcagccagtttcccgatggaacctattcctacaaacttggtcgctaatttagccgcttgtccggttcccgaccaagtgtcgtcggtgggttgtgtattgctgtcacccaatgtggtggctcctttattgcctgtatcccagaagttttcgcttccttcggcccatggattccagattttccctactttgttccaatcatcaaaacttccgttgggaagttcggctgcgcttccggtcgtaaatgttatttcgttccctgtcaagtcaccagatacggctcggcatacataggtcgtgttggctttcaaatgtatcatgcgagcggtgaaacttcctttatcgtgtgtgacgtattcgtcggggactttttcccatgtgccggctgtcgcttcttttatttcgaatccattttcggcatcttcttttccgctaccgtgcagccaagcaacattcgtccaagcatcgaccccgtcggtagatatttcggattcagatggtacgatatatagggtccattcttccataataccgtggtatacgataatgactttttggtatcccaaagagaaatcggtgagtttttctttttcgggagaatatgaggttattccctgaggacctaaaacgagttcggtgatttttatgtttgctaaatcgatgtctttgttgacataggcaatggctctgtgattatgggcatcgaataccggtgctcctatttgtccctctactctgaaacttctttcgatattttgggtggcatttatcgtccatgtgtagtcttgatagatggagagggtcaacgtgtaacttttggagaggtcgataatcgaatcggaaggaagatcggatacggctccttcggtgagatcgagggtttcgatatgtactcgtcgcaaatcgaccgtatcggacaattccatcgttaccatgcgtttgtcgttgtcgatagcggctgtaccgatttgtccgtcggcggagatccctaatatctgcgctttgatgcgagggtagggaatatcgttcttaatacaagccgataagaggagtgtacataaaagagagtatatgatgtgtatatcgtttcgtttcattttacttctatatgtgcaggcacatgccaatgttgatgttgaacaagtttattttgaaatcggctccgctcgatctacgacttccggtttcttcgttattcgtcgtttgtttgatcgttccgtatcgtaatccggctactccgaacgaaacactggtactgatgttgttcatgataaatacgcagaatcccggatttaaccccaatttgatttcagatgtcgttgttttggtatttttcaatgactcgtcgctccctcttacaaagcggttcgaaccgcttgaaaaggctaattccgtttcgttgaagaagccgaagcgcttgtttttgtcgattccgatatatgccctatggaacagagcggccgagaaggtctcgcctaaataacgtatatcgcccaaattgaattgcatatcgtcgtcgatgtctatatccaaattgtctaagtttgcacttaaatgactgtatccgagttttatacctatacattcgttgtctttgatgaaatagcctacgaatgggttcagggtagttatgttgcctttgaaattaaaatctttgatgaagatcaggaggttattgtctttactgtcgaattctccgtgcgagagagtcaaacctgcgatccattgcttttggggaatgagcagatagtttttcaatccccgtttgtatttttttctgctgagcccgtgtttttcggcgatcgtatcgggctcggacgtggcgacagaagtgtttctcggaacgatggttgctgtctcgggaatgacggttgtcgaatcttgcacttcggcatgaagcaatatttgcccgggaatgagtattcctattaaaatcaatatgtattttaagtttttcataaataaaaagcgatacctaaacccaaagaaaagatgttgactttgaagtttgccatgttttgagaccgtttaccggtataaacttggtcggtggtctgtttgacatgactgtaattaaaacctaataagccgacgtttacctcgatggctgtgtagtcattgagaaatgccatgagccccggcgctattccgatattgaagttgaacgaacgctcgaatgttcctgtgagagattctcccgacccgtttaccattttcgattctccaccacccaaagagagttgcagttcattgaaaagtccgaagcggctactgttcccgatactgatgtagttacgcatgatcgccattcccgaataggagtggctcagactatacacgttgtccatgtcgaagttgagatcgtcgcctattttgatggaggcattgtcgagtttcgtcaggcttcgttcataggcaaaccgacctcccaatcccaaattatctttgacgatgtagcaaaacatggggctcactttgaatgtgtagcctataccgtccatgttttcgatgacgaggaactggtagttgtcgttgctatattcggaataggatatggaattacctactacccattgtcctttgggtatgaatgtatttagtacaatacctcggtcgaactcctgagcgtgaaccgtagtaaggcttacccccaaaagcagagatgagcatatcgcagagatgagtttattcataaatcaattctaaatcgtcgagccacatggtactacccgtgctacctgtaaagtagtctccgtatttgctggcagaggccacgattacaatgtagctgggaatacgggtaagagaacggtaatcgagcggaatttcaaactccaagagaccaccgtcttgaccttgtgtctgggttgttaattcttgttcgccataggcgattattttttcgtcatttttatcgaacaagtttttatcttttgtcgtgatacgtaccggggcatcccagtctccaagtgcgatatagacaatgcctatatctgtcgcgccatttgtaagagcatctgtttcggaatagtctacggttcccggcgtgtatttaatatatccgcgaagtttggacggtcgcgaggtaaatgttcgtccgaaatcgaggataccgttcgtaccgtctcttccgataaactgtccggtgaacaggtttccggcagcaaatttgccaatacccatgataccaacgaattgagattgtaatttaacagagtatttaccgctgtgtttgtaggtctcgtcgggtgtagtcacgtttttattcatcgtcgcagaaccgtggttcccgctatcccaaaacatttcccctccttgcgggtatattaccattgctttgtccggggtatgccaatcttcgaaactgctgttgggcagtgtcgtcgcttcttcggtagtgaacgttatcgtttttaccgaggcttgtgttcctgcaacggcttgatattcgtatgtcgttcccggttcgagttgcgttacctcggcagacatacttgttcccgacaggacggcaggaacggatatccattcttgcgaaccggatttgcgatattggaaagagagagtttccgatgtttcttttaccaaagtccctgatagcgtggctttctttgcccagatactggatcttgccggggcttccgtaacgactatggcatcggatacgactatcgtcaaaacctgtgtattttctttttcatttgtatcgacggcttttatcgtgaagatatattctccgtcggggagcgattttacaaagttctcggacagagtgatttttgcgttcgaaaggtctttatcttcttgatagatgtgttttgctccgatgcctttgacttgaaattccgtgatgatgtcttcgggggccgacaggaaatcgatggaatcggccgagagtcctaaggaggggaatttttcacaagaaagttttacatttttcaatttggtcgcggcattcacccaaatcgcagcttcttttccgctgttcgtttcgtaataaagcggttgggttatatcgaatttgtctccgacaatttgcggacgttgtgtaatcactacattatgggtggagtctacggtcgattcatttactttgacgtcgatgaatgtacctccggtcgctgcgttgtcggcgttatagctgaatgtgaatgcgtatttcgtcgctttaactacgttttcgacaactcccgattgggtatagtttttaccgtctgtttttttcccttcgaaactccatgccaagctgcggtctttcccgttgagcatatagtatcctacggaatctacggtagattctgtaaatgagagctcgccggtcgtagtaaatatttttactttatagtcggttacaacgtttgctaactcgggcgagaacgcaaccgtcgccaacgtatttgcaatagtacatttcacttcggccgaggtagtttctccgctttggacggcgaagtcggccgatcctgtataatagggggtatcgaatgccgccgggacagaatctccggctattacaaagacatgatactgtccgcttgccaagttcagtatatcgggcatgagattttctctatcgtaataacgaatgagccctttactgctgtatatgcgggtttgcatggaggcgtatatgcccgggtcgatagcacgggaaacgacagccacctcgtcggaaacttttacgttcagccttaccgatccttcgccgagggtcatgtcttcttctttacaagccgatagcagtcctacaaggagcagtccgcaagtaaagtatgtttttatatagcgtttcatattattctgttacgagtattaatgtttctgttgtcgttccttgcgcgtcggtagcctttatgataaagttgtgagtccctgcgcccaataatcctaataacggcataaagtcgctgatgtcgaaggttactttcgattggttcaagacgttcgatccggtggggaatcccaatccttcgatggctgttttcaagtcgcccggatttaccaaatcgagatgcgaagccaatcccatacctgcaagttcgtcgggagtcaatgtcggcgattctatatcgactacaagtcctgtaagtccgttcttatcggagcttgtaatatctacgcttacttgtaatccctcggttacagtgaccggagtccctaattttatagtcgagctcgtaattttcggagcatcggtaggttggggatcgggatccgggtcagggtctgtgccggggtcgatgggattggggtcctcaataacttcttcgtctatcgtgacattcccgaaatggtcgattatttcgcatgaggcatcgagcgtaaccgacggtgtgacgcctcctgtctcgcttcccggttcgggtcgtttgatatcgtaatgtattttacgccattcgccggcttttacattatctacctgtatgcgattgacttcttcataaccgtcgatcgtaccggagaaggtggcgataagcaaattgctctcttcgtcggaccgaaaataaccggcacgagattcttttttcataaaatcgagagctccttctccaacggtgaccgatactttgcaatcttcacccatcagtgtttttaaatcctcggagtaggaaaccgtgacttttatattttggagggtacatacgagcgtatcgatttgtgtcactctgctttcttcgatagaaaaagttttatctgcatagtaatagggtttttcccattcggacggtcgaacttcgtgggaaaatacttttaaattataattaccgacgttcagtgtaactatttcgggtgtttcgctgtatttccaatccttttcgagcgtttcactaccgttatccgcgcggaatatctgtactgtaaagtcgcctgtgtcgacagctcggcttaccggttttttctcggtttcttttatgtcattattgggtatggcatcgaaagaagaaagatcgagagtcccggttttccctgaaatttctccgggttcggagtcgtaggtgagtttctcacggtcgcaagatgtgcctgccagtcccaagactatggtcagagctatgtaaaatatctttttcatatcgctatgtagtttattcataaatgaaatttaagttatctattgtcagagtcgctcccctcgaattggattcgtattgggagtagtagtcggtcgtttttatcgttgcggtttcttcactttgtgaataggaagcatgattggacgacgtaatcattattttcaacagattggcttttttgtcggtaacggtgtaaaccaatggaactgtaaattcggtatagtctgatgctgccgtaaggttaatagtcccggatgcgagtaccgtttctccatttaacaatgttaccgagatcactccggtttcagagacatcgttattatcgggagtgtatttataccaccctttcatcgtcgaaggtcgagatgaaaaagaggttccttcgttataagattcggaattaccggaataggagtaactgcctaaaaataatttaccagcagaacgattgctcatagagggaacattcgtattgtaataagtcgtattaaaagctcctcctgttttgctgggtgtggttccattagcatcccatgcaacattgcgtattaccattgcattgtttccgtcttgtgcggaaaggcctttgtaaatatcgggtgtttgtgtgctcattccaaaactgcgatatgagctccaagacagagtcgtattatacgttgagggaattacaaaccatgacatttgatttgccgcggaagtgttacaggtctttgcatttacactgctccaaccggtgggttcttgaattgtaaagctgcaagtgttttgataatccacaggccaaacggaatacttacccccttgattcatatcttgtatcgatattgtctgtgtgagttcttcaaaatttccgttaggtacgccggctgttgtttctgtccgtattgtacaatctccgtgataattgacattttcttgttcgttgttgcaagtcccttttatctggtaacgtgtgtcgggggacaatcccgtgagggtgtgtacatcgtcttcgtgcgtagaggcggcttggacccattgtccggtactgttggtataaagtacagcatagcggttcaccgcatcttggtattgcggatcggcggctgtgagtttaacgatcgctttttttgcccaaacgtcgtattcttcggctgatatcgtgaattcgggcgtgagaacagaaatggaagtcgcagccgtctttaatccaccggatagagaggcttctatttctatcggtttgtttgtggcttcgacggatattttaacttgatatagattttcctcggccgatagaactgtcgaggtacaatttactttgtggccttcggcgttaaggtaactgaattgaaccaaatcgatatcggacccatcgtataataccggaattatggccgaagagctacccacaaaaacggcttcgggttcttgtagggtgaatgttaaaggaaggtttttcaccgataaagaaataggcgattcactaacttttccgtacaagtcttttgccgaaatagtgaacatgtgttgatcgctattgccgataatttgtaattgtgtgaatagttcggtgaagtcgatgaatcccattttatttccaacttcggagaatcccttgattttcaaccctaatcgacggagtatttctgcttggtcttcactcatatttatgaggtcgatttcttgcggccaccctttgctttcgaggctacgggaggaggtcgtaagggtacacccggctaatcctcctttggccgtgagagatatatttacgtttttgtcggccggataattaaattcttttgcttcaaccggaacaccggattcaaaaccagacaggaggaaagagggagccggagctaccattacttcatcggatatgtctattttgataggttgtgtttcggttgtctcgtcgaaactgatgttgagttgtgcttcaccggcgttgttgtcgctgatgtcgagtttgattttgtagtgttgacgcgcggttgcgttgggtatggctgccggttcgaaagtagattcgatcccattttgttttttcaagtgggtctgaatcgtgattttcccgggttttacgtaggctgctctcgtctcggttttagaaaattcgatgtattctcctccggtagagtgaatggtggtcgaataatcggcaaagtattttttgaaagcgtcggaatactcgacggttacttttacattagccaatgtacagttgatttctaccgaactattttcccggtcacgcacggctaccggggtttctccgagatagaacggcttttcgaatccttctatatcgatatctccgtaaaaggcactcatcgtataggctccgaccggtattttggtagccgggtcgaaatcggccaaactatcccatgcccgagaaaaactaccgtcggaagagactagtttcaaagcaaattcgcttacatcgggattttcgattgtcgaggctgattctgctgtggagcgagttacaggaactactttatagtcggctgaaacttgtacgttgattgcaccgtatccggaagacccttgcttatcctcatttgcgcatgatactaacaatagcatggttgcgctatacaggaaaattttttttaatttcatgcttattttatttttatttcacctataaagagatattaataaactctttatgagcggcttcattgtgtaaatactcttatttgcacaaatgaaaatcggttcaaaggtataaatttttttcttagatgaaacagtcaatagaaagttttgttaagtataataatataaattaaggagatataggagttttgggctacaaaatccggggaatttgctaatatttttttagggtcggattttgtaaaaaatcgattattttttatttcatagtatttaaatttattctgtatttttatacgtaaagatagcttttttaacccctccgtccttcggccacctcccctatattttgctgtgcaaaaacaccccgtaatactacgggacacggcagggaggaggttgagatgtattccccccctattgctttgcgaccccccgtaatgctgcggagcacggcaggggaggaatgtgggtaactctgtttttatattctaaccttttcgtgcattctacctatataattgtattataaataccccgcaatgttgcggggtgctgcgttagcagtatagggggagagaccgaaggaacaaagttccggaggagaggggttaaaaaaagatcgtttgtacttgttcattttgttctcggcttgtactatctttgcaaaatgtgaagatagtcaagtttatttttaaacctctcgctctgcgagtactccccactatctcgttaaagacgaacggtgggagaggggcgataaaaaattggaatatatgaaaatagcggtagtaggtacaggctatgtgggcttggttacgggaacttgtttcgccgagataggagtggacgtcgtctgtgtggatatagatgccgagaaaatagctcgtatagagcgtggcgatatacctatttacgagccggggctcgacgagatggttatcaggaatatgaaagccggacgtttgcggttcgccaccgatctatcggcttgtctcgacggggtggaaatcttgttcagtgcggtgggtactcctcctgacgaagacggatcggccgatttgagatatgtgctcgatgtggctcatagtgtgggacggtatatgaccgattatcttgttgtcgttaccaagagtacggttccggtggggactgcccgaaaagtgaaagcggctatacagagcgagttggataagaggggcgaaaagattgacttcgatgtggcttccaatcctgaatttttgaaagaggggaatgcaatagccgatttcatgcgccccgaccgtgtggtcgttggggtcgaaagcaagcgagcggaggctttgatgcaaaagctctacaagcccttcatgatcaataagtacaggattattattaccgatataccttcggcggagatgattaaatatgcggctaacgctatgctggcgactcgtatcagctttatgaacgaaattgcgttattgtgcgacgaggtgggagccgatgtaggggccgtgcgcaaaggtatcggagccgatgatcgtatcggcagccgtttcttgtatgccggctgtggatatgggggctcttgtttcccgaaagatgtgaaggctttgataaagacggcggaagagaatgattgcgatatgcagattttgaaagctgtcgaacgggtgaacgagtcgcaaaaggaattgctttatcaccgattgttccgctatttcgatgggaaaatatcgggacgaaaatttgccgtgtgggggctttcctttaaaccggagactgacgatatgcgcgaagctccggctttgatattgatcgataagttatgtgaggcaggagcccgtgtaaaggtatatgacccggtggctatgccggaatgcaagcggcggatagggaataaggtggaatatgccgagaatatttatgaagcggttgccgatgtggatgctttattgattgtaacggaatggaaagagtttcgtttgccggattggaaaacggttatccggtctatgaaatcacctgtgatattcgacggtcgtaatatttatgatccgtctgagatgaaagagttgggatttgcttattatagtataggtcgtccgacggtttaaggattgatccgataaaaaagtaagacaggtatacgtcctattcggggcggatacctgtctttttataatagaaaggggctgagaggaatatccttctccgtaatggctgctcctccttttaccgttacggtttcgggaatccttcggagcgccctttctgtctataataacgatataggagtgttttggttcaatgtggtcgtgcttttatcgtgatttgtcttatttttaatttttttgtcgaaaatctgtttttgaggaacactttaattgtttggagcgtatctttgcaatggaacagaactcgatatcggtaagtgggattagattgtttcgagatgtattgtttttgtaaataaataatgttgtaaagagattttattatgaaaaaatgggtgtgcagattatctatcgtatgctgcttgtgtttgttttttacctctgtgaaagctcagctttcgttgggtgggcttggagacatactgaattcatcgacagtgaataaggttgtgagtgctattgccggtacagatgcttcgttgacggttgccgatttagccgggacgtggaaatattcggctcctgcttgtaagttcgaaagcagcgatttcttgaaatcggcgggaggtgaggtcgtggctgcatctttgaaaacaaagttggcgacctactatacaaaggccggtatcacgccttcgcgggtttcatttgcttttgccgatactacttttgtaatgaaatatggtaatgcgaaattgaacggtcatattgttaaagaagaagagagcggaagattcgtggttacatttactgccgtgggtggttacattcccataatggttatggatgccgttataaacaagaatggcaatacgttggaaatgcttttcgatgtggatcgattcgtgaaggtattgactactattgcatcgaagtctcagagttctacattgaaaagtgtcggtggattgctcgatgagtatgagggtgtattgatggggtttgaactagtgaaataagaaaatcatagtaaaataaaataaggagggagttttaaactccctccttattttattatattttaacacaaaaagaaaaaaaacgggaaaatagaagaccgatctttttgtcgaatgattacctttgttccatattataaactaaaaaataaataaaatgaagaaattagttttaaccttagctcttgtgtttggtgtgttagcagccaatgctcagtattttgtgggtggtcaattggggttactttacgatgatgcatcggaaaataccatgattacaatcgctcctgaattcggttatgcatttaacgatacttggacggttgccggtatgataggttatactcatatggacaatttcaattcgttttatatcgctccgtatgcccgttggaatttttggaaaaaagatttcgtaggcttattggtagatggtggtttcggtatttctactcaaaagtataaaggggcggattcggatactggttttgaaattggttttaagccgggtatatcttttaatttgaccgataatttctctttggtagctcattacggctttctgggatatcgtactaaatataacggaagcagcgtgtcgggcttgtctttgagcggcaatgagataagtctcagcttgtattattgtttttaatatttgaaacgaatcgatatttcgaccgtccgatttttatcggacggttttttttattcttttcggtagaattgtaaggtgagaaggtgttgccgaacttctttttttacgagatgacaaatcgggataggtcagcgatgtagggggagtgtatagggtgattgtagaatttgagcccttctccttgcgggtatttcccttatattttcgttgagttaacccctccgtcactatgtgccacctcccctatattttgcgatgcaaaacaccccgtaaggctacgggacacggccggggaggagtgtgaaattttccagcgtttttgctttactggggttttgagttctccgatgcttcgtttgcttctcttatctgttgcagatgagatgaggaaggggagaagccgatgcctgactctgtttctgttattgtcggtatttttcgacatttccattgagttagcccctccgttattccgtgccaccttccctatatgtctatgccacaggggaggagctaaaagactattctcattgatttcctattgagtcgtaaagggtggggctgtttttttttgttcgggtatgaaaatcccgctctatctaatttcgatagagcgggattttattttttgtatggtcttttactactttttcaaggctgctatgctttcttcgagcgatttgattttttcttcggcatcggctttctttttgcgctccatagctaccacggcttcgggtgcattttgaacgaagcgttcgttgccgagttttcccatcactgttttgaggaatccctgagcatattttaattcggcttcgagttttttcaattcggcttctacatcgatggcgttgctcataggaatcgcatattccgttgcatgtacccggaacgaagcggcggccggatctttttcttcgattgtttcgatcgttgccagattggtcattttggtcaatatgcaatcgttcgagtgatcgtgtgcgccgataatttgcagcgtgagctgttctttattggatatccctttttgcaagcggatcgtacgtattcccgctacgaccagtttggtcgtttcgaatcggtttatgatttccatgtcgaccggttggggctcgggcatgcgtgctgtcatgatgctttcgccttctttgcggtcatacaggtgttgccacaattcttcggtgatgaagggcatgaaaggatgcaacatacggagcagtgcatcgaagtaccggagtgtagcatcgtaggttttgcggtcgataggttgttgataggctggtttaaccatttcgagataccaagatgaaaattcgtcccagaagagtttgtatatagccatgagggcttcggacagacgatatttcccgaacaggtctttgacttcttcgagcgtacggttgagttgtgcgtcgaaccattctacggcaatggctgccgtttgaggttgggggagggtttcatctacgttccaaccttttaccaagcggaaggcattccatattttgttgttaaagttgcgtccttgctcgcataacgcatcgtcgtatagtatgtcgtttccggcaggtgcggccaacatgagtcccatgcggacaccgtcggctccgtaggtttttatcagttcgagagcgtcgggcgaattaccgagcgacttggacatctttcgtcctatcttgtcccgtacgattccggtgaaatagacgttgcggaaaggaagtttgtgttcatactcgtatccggccataatcattcgagccacccagaagaaaatgatatcgggggctgtaaccaaatcggtggtcgggtaatagtagtttatctcttcgttgccgggattgttgataccatcgaaaagcgagatgggccataaccatgaagagaaccatgtgtcgaggcaatcttcgtcttgtcgcagatcgctcatttgaaggtcggccttaccacttttctctcgggctaatttcaacgcttcttcgggtgtggcagctactacgaatccgctttgcggaaggtagtatgccgggatgcgatgtccccaccaaagctggcgggagatacaccaatctttaatgttttccatccagtgccgataaatgtttttgaatttatcggggtggaatttgatttcgtctttcatgacggcatcgagagccggggctgcaagtttatccattttgacaaaccattgcatcgatagtttgggttcgataacgacattggtacgttcggaataacccactttattgtcgtaatcttcgactttttcgagtaatccggcttcctgtaagtctttggcgatttgtttgcgaacgtcgaaacgatccattcctacgtaaagccctccggcttcgctgatggttccgttgtcgttgaatatgtcgatactcggcagattgtatttttctcccagcatatagtcatttacatcgtgtgccggggtgacttttaagcagccggttccgaactcaatatcgacataatcgtccatgataataggaaccacccgatttaccagcggtatgatgacttttttccctttaagaaatgaataacgcgggtcgttggggtttacgcaaactgccgtgtcgcctaagattgtttcaggtcgtgtggtggcaacgataatgtatttatcctcgccttcgataaaatagcgcagataatagagtttgctgtgttcgtctttataaatgacttcttcgtcggagagggcggtgagggctttggggtcccaatttaccatgcggactcctctgtaaatgagtcctttgttgtataagtcgacaaatactttcaaaacactttcggaacggatttcgtccatagtaaaagcggtgcggtcccaatcgcaggatgctcccaatttttggagttgttttaagatgattccgccgtgttcttctttccattcccaagcgtatttgagaaattcttctctggaaagatcgctttttttaataccttgtgctgcaagtttatttaccactttggcttcggtggcgatagatgcatggtctgtgccgggaacccaacaagcatttttcccctccatgcgagcccggcgtaccagaatgtcttgtatcgtattgttcagcatgtgccccatgtgcagaatcccggtgacattgggtggcggaatgacaacggtatagggttctcgaccgtcgggcttcgatttgaaaagaccgtttttcaaccaataggcataccatttttcttctacgtcggcgggattgtacttcgtggcaagttcgttcataaagtcgttctttcagaatgttctatattatttcaagatacaaaagtaaaaaggcttttgtaccaatcgggtgcaaaaatataaaatattttccgaaaaagatattcttcggagtcaaaggtgtttatggtatttgtctcgaaaagaaagtttttttgttttcgacatatttcgtaagctatcgtttaagcccgtccacggcggaacgtagttgttcgagcgctttttgcaaaactgcgcgaggtgtacctacatttagccgcatgtgtcctttgccttcggggccgaacatttcaccgtcgttgagtgcgagtctggctttatcgacaaaaaggtcgatgagtgcatcgtgttcgaggtgaagccgtgtacagtcgagccatacgataaaggatgcttgcggcctgatggctttgatgtcgggaatataacgatcgagaaactcttcgacaaatagtatattttgttcgatgtaggctaacatttgttcgcgccattctctacaatggttataagcggcttcggtggctatggtcgccatgaatgtgggttcgttcagctcgtttgccgtgagccagtcgaagaagcgcttacgaatcgtttcgttgggaacaatggcataggagctgaccaagcctgcgatgttgaacgtcttggaaggagctccaaacgatatactgttttgagccgctgtttcggataccgaggcaaaagggtgatgtttggctccgaagagaggcatatcggcatgaatttcatcggcaatgatgagtatgttgtgccgtgcacagatttcggcgattcgctgtaatgtttccaacggccaaaccactcctccgggattatgaggattacagagaatgaacagcttgcattgggagtcgatgatcgattcaaggtgatcgaagtccatttcgtagtgggagccgttccatttgagcggattatgtacaacctgccgaccgttactttcggggacggccatgaacggtgtatagaccggagtctgtatgatgattttatctccggggttactaaatacattgactgccaagcctatgcccttgacaatcccggggatataggtgatccattctctttttactttccagccatgcaggtagtcgagccaatcgataatggattgccaatagctcgcaggagcctcggcatatccgtaaaccgggtgttgtaaccggcgtacgagagcatccgttatacagggggcgaccgcaaaatccatgtcggcaatccataaaggaatgagatcttcccgaccatagcgctcacagagaacatcggttttcatagctccggtgtgatgccggtcgataattgtgtcgaaatcgtactgagaggacattttatatactgtttaggtgttaggttgcttatgtcgatttgtcaaaagccgagttctatctgaaatcttaattgccagcgattataatcggaatcgacaaattcatttttgtaattgtaagacaggtcggcttgtacttttaatctgtgatctatcagatatttcgtgacaccgaacgtcgattggttgtgactgcgataattggcataaggctgtacttctttatccggcatgatggtagagtttctcaatgcgatttcccaattggaacgaaagagataacttgcctgtacgttgagccccattccagtgaggacatattgttctacattttcgcccgatttaatgagcggtgaggaagatgatatacgccccatgaaatcggtataaaaagcaaatccttgatatttgaagatgaagtcgacaaaataggaagaaaggttacgggtctggtcaaacagtaatttgtccccattggaaccttgtgcccgaagagctcggtcgttatagctgtatgctcccgctaaaaggattttgggcgtttgttctcgttcataatcgccttccatagcatctcctttcccggtgaatcgtcccagtgggaatagttctatgcgtcccgtatatgcgagtccactccctttattgtttccccagtttctgccttctccggtagtaatagaggctttggccgctaaatccaaagagccgaatagatgttgattgtattctccgaagataccgaaatcgcggtcgagattgaattcggagtttacaatggaacgatctacgaattgtagggcactcgaagagtttattcgggcgcgattcgcccgtattttggtttgtccgaaaccgatattccatgtcgagttgggaacgtagtaaatcattgcgtcgcgtacgatgttgttgttcccattgggcagcgttttcatatcgtaaggtgagaagcctaactgaactaaataggtgagtttgggtgtatagatatatccatcgaaacgtaacctgagccgtttgacgcgggcgtcgatatcctgagcctcgaatttctcgttgaagtcgacatcgaccaaattttgcatgcgaatgcgcatcgtgagtttatagcttttgtttttaggttggaaagatataccgttcccgacttctatatcgggcatgtgcattcgtattttttctaattcatcggcataatcggtatcggaggtgcggaccgtggtcgaatcgttcccgatgataaatgtctttgcggatgcagatagcatgaatagcgagagaaatattcccgatagaaataatcgttgataattcataacgttgtttgatttgattttgaaattcatgctacaaaaattgaatgtgattttgaaatagatttggaatacttggaatattattaaaaatattcattttttattggtgcattttgtttcttcgacaaggtgttttttctgtgtaaatttcgacaaaaggaatatttttgaaatttttcatacctttattttaaattgctccaaaattacaaccaatgtgtcaatattccaaagaccgtttctgaaatttcgacaatgggggaatcgattcaaataaaaaaagtccatagtgtatatattacgctatggactttgcatttgcggaaggagggggattcgaacccccggtacccattcgagtacgtcagtttagcaaactggtggtttcagccactcacccatccttccaaaggacgatttgtcgttgacgtcattttttcaaatgcagcgcaaagataagcggaatatttgaaacagcaaactttttcgcattattttatttcgggaataatcgttacttttgtcccatcaaggtgcttttgcgctgtgtataattggattattatgtcgaatgtgaataaaggtataaagatatttgcttggataacaggagggcttattttgattctcgcatgtttgtttattccggtaatgaagagttatttgtatgatcctgttattaccgaacaaacggtgtgctatgtttatccgaagtggaatgatgctcagctcgatagtgctttgcattcggtgattccagatgagaattcgatcccgagaataaaacgtttgctgtcgttttataaattcgatcctgatgttcgtgtaggggcttatcggcttcatgccggtatgacagctcggcaaatggctttgaaattgtcgaggggaagccaatctcccatacgagttacatttaataacgtacgcactctcgaacaattggccgaaagggtatcggagcagttgtttttttcgaaagaggagttgttggctttgctgtacaacgatagtgtttgtgcggatttaggttttacgaaagcgactctcccggctttgtttttaccggatacttatgagttttactggactgtgactcccgaatcttttttacagaagatgaagcgggagtatcgcatttattgggaaggaaagcgggagcaacaggcaaagcggtggggattgactcctgtggaggtagcgactttggcttcgatcgtagaggaagagactaacaaacgtgatgaaatgggaaaggtcgcgggtctttatatgaaccgattgcgtaaaggtatgcctttgcaggcagaccctacggtaaaatttgcccacggggatttttcgctgaaacgcatattgaatgttcatttgaccatagaatcgccatataatacttatcgggttacgggattgcctcccggccctatacggattccttcgaagcaggttatcgatgccgtgctgacacatacaccgaacgggtatttttatatgtgcgccaaagaggatttttcgggctatcataattttgccgtgactttggcagagcatcaacgaaatgcaattcgataccagcaagcattgaacagactcggaatacgttgatgggggaatgtaaatagtaaagcctcgtctcacgacggggctttactacttgaaatatatcaaaaacaagaaagaggataatgtttattacaggaataaacaaaggataatataataccaatgaaacacacaaaaaacaagaatattatcgtataaattaactcttccagaccggagattttggctcgacggaagcgacgcttcgcttctttttccctaaggagagccgtttctttcccggtttcgataataaaacacacttgtattgcaaaaagtttttatccgtagtgattttagtatattttaataattcgagatttcttctacgggaggaggcataggggtatcggtatcatcgtctatccaaatagccaatgtgagccaatataacaatagtgcgatagctatgcctacacctatcgcagtccagattttttgtcgttttttctccatactatattagttattcgaaagaataacatcggtcgggagataaaagttctttttagaagggtatatcgttattggacgaaccggggggattcaggaaatcggggttcccagacagtggcgttgccgatggtgtgctcgtgtcgggagtattgaacttcgaggttaccggtgcactgaaatcggtcagtcgggtgtcttcgtcgtaattttggaatcgagccagataagagacgaatttcatattcacggtatcggtcgcaccgctacggtgtttggctatgataaattctgccaagccttcgatactgtttccattggcatcttccttagaccgagtataatattcgggacggtgtataaagcaaaccatatcggcatcttgctcgatagctcccgattcacgcaagtcggaaagttgcgggcgtttcccttctttaccgtctttgtcgttaccccgggattccacgctacgatttaactgtgacagggcgatgataggtatttgaagctcttttgccaattgtttgagcgaacgggatatggtgctgacttcttgttctcggctcccgaaggacataccgctggcgttcatcagttgcaagtagtctatgatgatgattttgattccgtgctcgcgaaccaatcggcgggcttttgtcctaagttcaaaaacggaaaggctgggggtatcgtctatatatataggagcgttcctcagtatttcgatacgagacatgagccgttcccattcgaacggggccaactgtccgcttttgattttatcgccggggatttcacaagtgttgatgatgagacgattgacaagctggacattggacatttcgagcgagaagatagccaccggcgtgttgtagctgacagccatgttctttgccatagaaaggacgaatgccgtttttcccatagcgggacgggcggcgataatgatgaggtcggaattttgccaaccggaagtaattttgtcgatgtcgtgaaacccggtttgcagtccgctcaatccgtcacttcgattggctgctatttgaatttgtctgatagcttcgctcagtaccgggtctatttgagtaacgtcttttttcaggttacgttgggaaatttcaaagagtttcccctcggcttcctgcataaggtcatctacgtcgttggtctcgtcaaaggccttgttgagtatttcgctggaaaattcgatcaattcccgagccaaatatttttgggctacgatgcgggcatggtattcgatgtgcgccgccgatgccacacgtcctgtgagttcggaaatacggagggctccgccgacttcatcgagctttccgtcgagtcgcagttgctcggtgacggtgagcatgtcgatggggcgttgttgtgctcccaaccgggatattgcactataaatgagctggttggtcggctcatagaaacactctggctttaagatgtcgcaaacggtggtataggcatctttttcgagcatgagagctcccaacacggcttcttcgagctctttgtcctgaggttgtagcttgccttgttccgaaactttcggagcgtaggcttttttctggcgagtgtaatttcttcgagtttccatgcagcaattctttcccgttacaaaagtagtcaatctttctgctatcgggaaatttggtgagcgaatcttataatgaacttttcaacaggcagatatttccgattaattacagggccggtgtcgtatcggggtattttgccatttgcttttcacaatatttttggaatagctcccaatcgtaataaggtgcatattccgaatcgatgggtaattttatttcttgttcattgaacaatactttcacgagtattttcccatcggtatttttataaagtatccattggatattcgtcgccataggattgtatttgaagtcctgccaaacctcggctactttttcgggatcggcttctacaacggctgcattctcaatacctaacagggcgagtaaaggaattgtattttcaccgtgtgcaaaacgtaaattggcttcgacaccgtttccgtcgatcgccgcttgcgatgtaaccaacatgtcttttaacagaggtttcgcaatggcgacagggagtccttttccgggaatggagttggctttacgcaggtattgcgatagattgttcgcactccataaatcgaatttttcttcttctgtgaaccacggatatagggatatgtcgtagtcggtattcggcaatatgatggttaacgcgtataggtgggtcatgaatgtaataggatcgggtatgatttgttcccactctttcttgaatatacggtcgataagccttgtgggtgtgtgcttttcctgataggctcggagtatctttttccatgagcctttcgagagatattgttggtattcttttcctttgaagaatcgcagggtattgtcatatccgttgctgggatccatagaaaactccgcagtgggggtatagcctctcatttctgcgacgaatgccgccatactagccatggagcgtggaaccgtggtcgattgtgccacaagggtcactttgccgtcctgaggtgtaaacgccggacgaaagcggtgatacatgcgacgagccatatcccggtgttgtcgggctccgagcggagtgaggtctccccagcgatgattcattaaatggtagatggtgtcgatttgattacgcagcagtttgccttcccgggttaaaaggttcaaagaatcggctttattcattagtttgtacaggttcggaaccatactttttgaatcgtgggtgcgtgaaccgtgtcgagctatatgatcgatgtgaaacggtatgaaatcctttggagccggggtgtctgtggtgtcgttgcaataataaacagatgccgtactaccgaaaaattgtggattttgatgtagaaaatcttttatagaattttgcccgaaagagattgcagataggcataaaaggatagtaccggcggtgagggttctttttttcatttgtttctgtttttccattatgtcggtaaaattataataaattttctcttcgatgaaatttttattcttttttagagtggagttgcctatgtgactgagaatggttattttcgcaaagattctcgaaaaacaaggatatagatgattagatttcccaatgcaaaaatcaatttggggttgcgtatcgtagcccgtcgtcccgatggttatcacaatatagagacggtattttatcccgttcagttacaagatgctttggagattgttccaacgtcgcaacaggagacggagttgtctttgtcgggaattgtcatagacggtgatccccagaataatttggtgatgaaagcgtggcgaagattgagccatcgtttttcgttacccccgatatctatttatctccataaagccataccctttggtgctgggttaggaggtggttcttccgatgccgcttttttgttagcgatggtgagagattattttcgtttgccgttgagcgatgacgagcttgacaaggaagctgcttctctgggagccgattgcccatttttcttgcataataaacctttattagccaaaggaataggcgatgggttcgagccgatcgaattgtcgttgaagtcctatcgaatcgtattggtaaagccttctgtctccgtgcctacgtcggtggcttattcgttggttactccggtattgccggaagagtcggtgagggataccgtttcccgtccggtcgaggagtggagaggtagattgatcaatgactttgaagaaagtgtgtttgcccgatttccggaaataggagagataaaggatcgtttatatgaacagggagctgtatatgcatctatgtccggttcgggttcttcggtatttgccctattcgataaagaagtcgatcttgccgattgttatccggggtgttttgtttggactggaatttgtgaagtatagcgtataaaatcgtttttgaaaaagagaatgatcgaagattgttacatgaccggtattatagataagataaattctttatatccgatttccgatgatacgatacggacattgaaagagagcatgactttgtgccgttttcccaagaagtatcagttgataagggcgggcatgtattgtaaatcggcttattttatagggaagggaatgactcgctcgttttggttggtgaacggagaagagataacgacttctttttcgtgtgagggcggaatcgtgttcagtatggacgaactctattataacaagatgagcgaagaatttgtggagacccttgaagatgtagtcgtttatagaatatctctggataaattgcgtcggctgttcgaaacgaatatcgaactggctaattgggggcggattattcatcaagacgagtaccggcgtttgcatcgctcccataaggaacgtttgactttatcggcaaaagaacggtatgaggagttcaggcagcaattccctcaggtgaaccagcgagctcaacttgggtatattgcatcgtatttgggtataacactctcgacgctcagtcgtctcaggggagcccgaaaatgatctttcagaggattttttgacataggacaaattttaaattatataagtcctgtaattttgccgtaatattaatcatcactaaaatcaaaaatctaaattaccaattcattatgcaacaaatttcttctgctgcgttttcagataccaaacctcattatgagttgcttgacggattacgtggtgtagccgcgcttttggtcgtgtggtatcatgtcttcgaagggtatgcttttgccggtggtactcttatagaaagcatcaatcatggatatttggccgtggatttcttttttattttatcggggttcgttatcggttatgcctatgacgatcgttggggaaagagcctaacggtaaaaaatttctttaagcggcggttgattcgtcttcacccgatggttgtcatgggtgcagttttaggtgtgattacgttttgtatacagggtagcgaacagtgggacgggactcatgtggctacgtcgatggtgatgtgggctttgcttttcgcgatgtttttcattccggcctatccgggtgcaggttatgaggttcggggtaatggtgaaatgtttcctttgaacggtcccagttggtcattatttttcgagtatatcggtaatattttgtatgctttgtttattcgtcgtttgtctactaaggcgttaactgtttttgtcgtattactgggaatctgtctggcttgtttcgctatcttcgatgtatcggggtatggcatgataggggtaggctggacgctcgattcggtgaattttgtgggtggactgttgcgaatgcttttcccgttttctttgggactgttgttgtcgcgtaatttcaaaccggtgaaagtgagaggggcattctggatatgctctttcgtattgttggttttgttttgtgttccttatgtagaaggggtcgaacctatatgtatgaatggtctttttgaggcattttgtatagtcgtggtatttcctgttctcattatattgggtgcgtcgggaaacacgaccgataaaacatctacgcggatatgtaaatttttgggagatatttctttcccgctttatatcacgcattacccgtttatgtatttgttctattcttggttgattgagaaccagtattttacattcggggaaacgtggcaagtagccttgtgtgtttatgtatggaatatattggtagcctatctttgtttgaaactttatgacgagccggtgagacggtggttgagcaagaaatttttgaaaaaacgctagggataaccccgttaatggggtttatttgatagatagtaaaatttccatgcttaaattagttttatgaaaatgatagattgtagaaagtcgttgatggtatgcatcggtttgttgatgtgtggaaccttttcggcgcaggaatcggagttcgatttggcatcgcagagatcggaagcgcaagacgtttttgctgtgccgggtaaaaaattggatcataaagggataattattaaccctactcctcataaactggttctcgacccaatcgggaggctcgatatttccggtggagtgtgtctaaaagataagcatggaaaattttccgaagatttggattttgtcacttttaacaagaagggggtaaaactctccgtcgattttggttcgaaggtttcggctaagtatggggtaaaatctgtttcgggtgcatatcgcatgaatatcggaaagaatggtatatcgatcgtcggttatgacgagcggggagctttttacggtttgcagacccttcgccagttagtcgagagttctgcgactgtaacgggcgaattaccatatgtggaaatcgacgattaccccgatttgaaataccggggggtagtagaaggattttatggaacaccgtggtctcatgaggtgagaatgtctttgatagatttctatggtaagttcaagatgaatagttatttgtacggcccgaaagacgatccgtaccacagttgcccgaattggaggcttccatatcccgaaaaggaggccgggaatatcaaagaattgatagaggcttgtaaacgtaatcgggtcgattttgtttgggcgatacacccgggacaagatattaaatggaacgaggaggattatcaaaacctcgttaataaatttaatttgatgtatgacctcggtgtacgggctttcgccctctttttcgacgatatatcgggcgaagggacaaatccggtgaaacagacggagcttttgaatagattgactaaggattttgtgaagtccaaaggcgatgtagcatatttaacggtttgcccgaccgattattccaaactttgggcaaaccccacaccgcaaggaagtcttgctatttatggagaaactctcgatccgtcgatagaagtgttttggacaggagacgtcgtatgcagcgacttaacaccggagactttggattgggttaattccagaattaagcgaccggcatatttttggtggaattatccggttaccgactatgtgcgcaatattattttgcaaggacctgtttatggcttgaatacttcgttggattccaatgatctttgcggaatagcaagtaatccgatggaacatggagaggcttcgaaattggctttatacggggttgccgattatacttggaatatagcggcttataatcctatcgataattgggagagaggactcggcgaattgatgccgaaagcaagggaggcctaccggacattcgctattcattcttgcgatacggagaccggttatcgccgcgatgaatcgtgggaaaccaagactttcagaatcggtgattggaatgaaacggaggctcaggctctttgggcagaattcgataaggtagagaaagctcctgccgaaatagagaaaggttgcaccaataaaggtctgatgagtgagttgactccgtggctccaagaattcgggaagttgggcacgagaggaaaacgggctttggaacttgcccgtgtttatcgtgacggtaaagatgatgccgatttttggaataagtatattcggaacttgatgagtaagaaggatcgagaagattatgaggctcataaaagcgggaccatgaaactgcaaccattttatgaaaatgctatggacgatatggcatacggcttcttaactcggttgtcgggcgagactcctatctgttataggggtataggttcgttccataatgcgaaaaccacgttgagcaagttaatgttcgatcacgatactacgacttattatacatcgggaatcgctcaaaaagccggcgattggatcggggttgatttgggaagtgtcaaagatgtgaccgaagtttctattttgcaggggcgtaattctgtagacgatgtcgattatttcgaccatgccgtagtggaatattcgattgatggtaaagcatggactccgttgacggaagagttgaataaacagtatatcgttcgttggaatggggagcctgtaaaggccagatatgttcgattgaaaagactcgaatctactcgcacgaattacgcatcggttcgttcattcgaagtgaatcctcccagagtggaacatttgggtttcagcttaaagtccgacgatgtacagcaagctctttatgcgtttgatcagcaaataggcacaagttatcgaaataatggaactttttctttcggggtcgctcctcggaccgagggatatactttgttggtgaatgaattgccggaggcggggaatggagcccctgtcgtgcatttgagacagttcaggcccgatggttcgttggcggttgagtcggttatcgattcgtcgttttttaaggttgagttggccgagggagtttccgaagtacaaatagaagggccagtggagatattcgagatagtgccgaagtttgattagtgtcggatttttacgtttaaagaacaattattatttttgaacaggatataaaaagagcaggtttgccctgctctttttcttttggagaaagggaattgcttttttgcaggtaatggatagaaatgaaaacattgggaaggtggcagtgcactctgacaaaagtgcagtttaggcttgtttggcagtgtttttgatactataatggtgctcattggtaatgatgatatgagcgtgatgaaaatgaaaatgtaacaaaagaaaaattataaatatggccgaaaagaaagaatgcgaaaaatcgcaaaatattgtagatgaggcttctgaaaaggagaagaaagagtcgttgaaccaagaacccgaagtttcggaagaaacaggttccgaggagggcggtgaagaaggcgaggctgatgaggctgccagattgtcagccgaattggaaactttgaaggcgactatcgagaaaatgcagaaggattatttgctattgatggccgagttcgataatttcaggaaacggacgttgcgtgagaaatcggagttgatcaagaatggcggtgagaattgcatgaaagctattctgccggttatcgacgattttgaacgcggattggcagctgtggaagaaagtaatgatttagcggctgtgaaagagggaatgagcttgatatataataaattcaaaagctatctagaacaaaacggcgtaaaggagattcctacggagggagcggatttcgatacagaatatcacgaggctgtgacgatgttcccggcttcggatccggctcaaaaaggtaaagtgatagataccgtgcaaaagggatatacgctcaatgacaaagttattcgctttgccaaagtcgtggtaggggaataaattataggacaggtagcaatggaaaaaagagattattatgaagtgctgggtgtcgctaaaaatgcgacggccgaggagataaaaaaggcataccgtaaaaaagctatccaatatcacccggataagaaccctggaaacaaagaggctgaggaaaagtttaaagaggctgccgaagcgtatgaagtattgagtgatgcggataagcgggctcgttacgaccagttcgggcatcaagggttaggtggtgctgccggtggcggtttcagtggcggcggtatgtctatggaggatattttctcgcatttcggcgatattttcggtggtggattcggcggattcgaaggcttcgggggcggctcacgagggggacgtcgtcatgtcaataaaggttcggatttacgagtaaaggtgaaactgacattgaaagagatcgctaccggtgtcgagaaaaaaataaaggttcctaagtatgtgagctgttctcattgtaacggtacgggtgcagagaacggtacggcttatacgacatgttcgaaatgtaacgggtcgggagtagtgacacgggtacaacagacttttctcggagctatgcaatcgacgacgacgtgtcccgactgcggtggagagggccgtattattacgaagaagtgtccgcattgtgccggggaaggtatcgtacgtgaggaagaggtaatcacgttgaatattccggccggggtatccgaaggtatgcaactctctatggcgggcaaagggaatgctgctcgtcatggcggtgtgaatggtgatttgttgattttaatcgaagaggaaccgcatcccgatttactgcgcgacgagaacgatttgatatataatttgctgctcgatttgccgactgccgtattgggtggttctatcgaagttcctactctcgatggtaaggctcgtataaaagtggatcccggtactcaacccggaaaaatattccggcttaggggaaaaggattgccttcggtcaatcgttatggagtaggtgacttgattgtaaatgtatcggtttacattccagaaaacctcaatgccagcgaaaagaagcatttcgaggatttgaaaactgcacccaatatacagcctacactcacagctaaacagcgaatattcagtaaattgcgtcatatgtttgagtgaaaacgacgatgatataaaatgaaagcaccgtatattattgatatacggtgctttcattttatattggggaatagttctttacattccttgtataacgtaataggtgtagattaaaaaaatgattcctaccgataacccgatgaatgaccatcgggtgaataatttgtctttgcctataattccataacataatccgattatggagcatagggtaatgcctatcggaaaaatgaaaaaccctattgtgatgaatcctatgagcatgataatgcccattatgattagtattttactcctcgttatttccatttttgtaaaatttgaatgtttcctctgtgatttcgtaatctaagttgaggagtatggagtctttttcgcggggagagagcgtagaatcttcttcccagccatactccttagccaattctcgaatagcttttattttttcttgatctgaattgaatacccgtttcttcttgtgtaacttagcttctacatatttccggagggtttcttgtgctctgaattgttcgcctcgggtatagtcgaatgactttaagctatcgatgtcttgcagttcgtcatatagcgttaatgtccaaaataggtttttgtcgggcaatcgggtgatgatacagggaatgattttttttcccatgtttagcaattgcggaaattgttccaattttttcgcatcattcgtgttgctgctgaggcgggttatcgggttggtgttgtaattgtttacccatgcgttgaaaagactgtcgaatttttctaagtcatctcctgttaaaatcgtatcggtatcgcagtctgcaacgataatttcggtagatccgttagccccgccgataacagaagcggatttcccggaacaaccgatagttaaaagataaagtagaatgatgtatgtaaaagagcgtttcatgtttcttatttttgaaccgcggaattgtaaatgattcttgcgatatcggcgataatttgtgtattggtttggtcgctctcacgagagtctttgatgaaaatagtgagaaagcataattttccgttcgggagatagattacgccggtatcgttgtcgccgatttttgttccgtcgtccaaacggtcggagctgcctgttttgtgtcctaagacaatattatcgggcaatccggcttttattttatcttttccggtagaagtttctatcaaaatattttttagaaattcggtatgtgtttcattcagtatcggttcgttgtagagtttttccaatagttgaagtgtagacgaaggtgtgctccaattgttatagcaattggatatgcgagagtgcatggtttcttcggtttcggtgagattgtagtttgtgatacctaatttgtcgattcggtctttcacgatatcgataccgccgagatagtctatgagaatgtcgcaagcgttgttgtcgctttgagaaacggcatagcgcatgaggtcggcgtaagaaagataaaagtttctttcggggtataattctcttagcgggctataagtgtctttgtgtatttgagacgattcgatgaagcgtaaagagtccagagcgatacattcgttttccattttttgaagagctgctatggcaacatggagtttaaaaatactcattagcggataccgatgttcgtcgttaaacgtaaataattgtccgtcgatcgagaatgctacgccgaccgttgcatttttcccttgtatggcctgacgaatcttttgtccgacggtcgattgtttttccaagctaatagcagcgatagggtgtagtcctatccatgaaaacagaaaacagaatagaattattttattcttgggcatgatgttttgcttgttttaagttgagtaaagatataataaatttaatcatgtatgcccggctttatttaatttaacagggagatagggtatcggtgcgtgtttatcggaatatcttgttcgggagtatttttcattcgatgttgaagaatcagaggttaataatggagattatattgttatccttattataattttaaataaatatattgtattaagaaaatttttgtgtgtttatttatctgaatataaataaaataaagattaataaacgtggttttatttttcgtttgttcaaaaaaaatagaaaaaaattacgaatctcactagggatatagttcgatttagggttaatattattgatacggtatgtaaaaatgtttcgtgagatttatttacgcaaggtatacgagagaggaatgtttaaatagtattatttatgttaaatattaaatggttaaatctaaaagcatgaaaaaaaatcagaagtgtaaaattgggcttttggcgttttctttgtctttttttgttccgttttttgctaatgcaatagatcaaggggcaggaaaggttactgcaaatgtaacccagccaagcaagcgtactattaaaggagtggtttccgatgtttcgggagaaccactaatcggtgtgagtgtattagtgaagggaacttcgataggagcttctactaatatagacggtgtttactcggtagaggtcccgaataataatgccgtgctcgaattcagttatgtcgggtatcaaaaggcgactttgtcgttggcgaatgcttcctcatacgatgtcgttatgcatgaggagacacgggttttacaagaagtcgtagtaacggcgatgggtatatcgcgggaatccaaaacgcttacctatgctactcagactattaagaacgaggaagtgacccgtatcaaggataataacttcattaactcgctgcaaggaaagagtgctggtcttactatcgttcccaataattcgggagcgggcggtggagcttctaaaattgtgcttcgcggttccacttctattctcggaaccaatcagccgttgatcgttgtcgacggtgtacctatgcaagacggtatgggtacgcaggcgaccgataatatgatactcggcggcggacgtagcggcgatgacctcttgtcgacgatcaaccccgaagatatcgataacatgacgattttgaaaggcccgaatgccgcagctctttacggtagcgcagccaataacggtgtgatcgttatcacgaccaaatcgggtgcttcgggttctgtcaaggtgaatgtgtcgagcaccacgtcgatcgagacgatagccatgtatcctcgtacccaacagatttatggtatcagtggcggagaccaatggtcggcgtggggtcctaagatcggtacacgttcggccgacgaggtggcttctgccccgtatctgatgaattctgcacgcaatgccgtaaaagactttttcaacaaaggcgtgactacgaccaacggcgttacgttgagtggcggtacggaaaacttccgaacttatttttcttataataatacctatcaaacgggattgataccgaacaataagtttacccgtaataacgtgatgttcaaggaatctttctcgttgttcgacaagcgtatcaatatcaacacgagccttaactggatacatcagaagaccgataacgctcctgttgtgggtaaggcattgagcgctctctatgctttgtaccgtactccggccgatatcgatatgcgttatttcaagcataactataaacacctcggtacggtggccgacaatatcgtgagcgatccggagaaaggtaatcccaaattgatcggacaaccggttcaaacttggtactggtatgaccaatatctgaacaacccctactgggtggccaacatgtataacgattatttgaagcgcgaccgtttgttggcaaatattactttggatgccaagatttggcaaaatattaaatatcagacgcgtttcaatgtcgattatgtgactcagaataatctgaacgaggagtatgccggtatgaaccgggtaggcttcgattatgtaggtggtaaatattacaatggagattctcgctcgagcgacatttataatgaccacatgctcacttggaacgaccgtttcaatgataaaatcgatgtgaatgtggctgtgggaaccagcttttcacgtcattacgatcgtaacacgagcatcactacggcgatagatacttgcggtgtgcccaatgctttcgttcctcagaataataaacacagccgtcccaacaaccctaacggaagtgcaacatcggcttcggacagttggaataacaaggattggagcacggcactcttcgctacggcttcagtcggattattcgataaagtttacctcgacggtagttatcgtttggagtgggcacagtcgttccaacagttcacgcaagggagcggatataaatcgttcgattactattcggccggtgtgaatgtgctcatcgacaagtttttgcctcgccgggattggctcaatcagttgaaatggcgcggtagttggtcggtggtaggtaaccccattcccaacaccttgttcgcccgtcagagctacgatttctccaacggtacgatcagtactcgtcctcctttgttcgatgatcctcaaccggagacgaccacttcgttcgagaccggtttggacgtttggatgttcgaaaacaaattcaacttcgaccttacttattacaattcgacgttacgtaaccagtttttgtatgtcaccactgccaatggcgaatcgaagccggtcaacacaggtaagatacgcaactatggtttggaattccaagcatcttatcgctggaacatcaataaggattggagatggcagactggattcaatatcgcatggaatgacaaccgtatcctcgaaacttacaaaaccgagagcggtgctccctacgaagtgcaaatgggtcccaacgctttcaagattaaatacgtagaaggcggacgctatggcgatatttatgtcaactctttcgcccgcgatgaaaacggccatatcaaaatcaatgatgccggtaattacgagaatgccgttcccgtgatggcttccggtaaatacgagaccaaagtgggcaatatgacttcgcctgtcactctcggttggaacaatacatttacttggaaaaacttcacgctctatttcttgatagacggccgtatcggcggtaaggtgatgtcattgaccgaggctgatctcgacctgtacggcctttccgaacgttctgcacaagaccgcttgaacggagaacgggttatgcaaaacggaaaggaatatattctcaaacctctacccgacggatcggggaacaaagtttcggtcgagaactactatacgaccatcggtgctcttcccatggaagaccatgtatataatgccaccagtttgcgcatgcgtgacatctcgttgagctacgacatgcccaatttgttcggtaagaatcaaggtatgaccgctcagttctcggtgaagaatgcgttctttatctataaagattctcccgtggatcccgacatctcggtatcggccgccaacggttactccggtatcgactgttattctttgcctacgacgcgtagttttgcgttaacattgaaattcaatttctaatgaagaacgatttaatataaatagtcatcaatatgagaaaaacaatatattcgatcggattcctcgttatcgaatccgtgttttcagtaggtttgttcacttcttgcggcgaccagtttcaggaggagtatccgtggttgatcggtaagcaggaggagatggacaacaataacgaagagggggcgggagctaccgatattactgttctcgagaaggagctgaaaggagctattccgttcatgatcaactattcgcacgaacctaacggatcgtgggcgcctcacaaatatcaatattacagggcgaacagtattgacaactatgcaggatactggacgactaccaagagtacttttgctttcggtggtccgttgcctacgctttatactttccccaacgattatttggggggccctatggataaccagattttcacacagtcttacaatgccattcaccacgctaccgaattgggtaaacccgaatggcgtgctgtggcgttgattatccaagcctatcaaggccacgaaatcgtcgacttctatggcgcggctccttttagcgactggcgtaatttgaaacgtactccgccgttgacctatgaaaagggcgaggatatttacaatttgattttcgacgatctcgacgaggctatacgcatattgaaagagcgtcagccgtcccgcgaggagttcgccaagatcgaggatttgactatcaagacgctctctaatggagattggcgcatgtgggtgaagtttgccaactgtattaaaatgcgtatggccatgaacatggtgaaaatcaatccgggtacggctcagtccaaatttgaacaagctgtcaccgacgaaatcggtgtcctcaccgacactgatgcgaaggatatagcctattatcaggagcaaaacgcttgtgctttgtggcgtatcggtaacgagtggcacgatattcgtttgggtgcttcgtttgaaaatattctcaaacgttacaatcacccgctgcttacccgctggttcgataccaatgcatatcctattaaagagaagtctacgggtatacaggctcccatcgatgtttacggagtacgtacgggtatcagcatgcgtaacagcaataccacaggcaaggacaaaggcggttatggcccattctcgactttgtcgggcgaattcaaatatatgcatcagtctttcttcaaacgcaccgagagtatcttcttgttggccgaggctgctttgagaggctggaatgcgcttggccgtgacgctcagagttggtatgaggccggtatccgtctttgtttccaagagaatgggatcaccgacggaaccgtcatcgacgaatatcttgcccagactgcggcgaaggatatcgattatgtcgatccgtataacaacgagaacaacatagccggtcgtgtgaaagtgggtgtgaaatgggatgcgagcgactcgaaggaggtgatgctggaaaaaatcatcactcagaaatatatcgccaacttccccatgagcgccgaggcatggaccacgttccgccgcacgggatatccccgtatcttcccggtcgatgtgaacaacatgaaagaccaaggcgtcgacaccgagttgcaattacgtcgtattcccatcgaggagacagccaacaatacgttggagatcgcttcgctcgtacaggctctcgggcaacccaacaccggcgcttcgcgtgttttctgggataaacagaccgaaacccgaggcgagcaaagccccgataacgaatttacattggtaattccggtaaacttttaatctataaaacatttgaaacatgaaacgatatagctttatattctttttggcgagcttcctcggtgtgacttcgttcaccgcatgtgaggaggaagctacgctcgacggtgcgaccgaggtgtatattaccatcgatcccatggacattaatttgaaattgggcgatacggtgaggatttcggcgacggttaccaatgtgagcgggaaagtgatcgagactcctgtctcttggtcgatagaagaccagacggttgctgccttgctgggcgataccgctgtggtggctttggatggcggtcaggaaaaagagacccggctcaaagccatgttggagaacggcaaatatgcccttactaccgttaccgtgtcgcgcaatttgcccgacggtgtgatgtgtattcccaacgacagcactttcaccgaaatgacttcgaaacgtagttacaatacggcccacgattcggtgctgttctctgtttctcccaaagaacttctttatgattatgatccggttcctactctcgaagggctaaccgctttcgatccggtgatgacgatcgacaccgtgagaggtctcgtagccgtgcactatgcagctccccgtgcctcggggaagggaaaagtcaccctttccatcggtgatgcttccacggtcaagtcggcatcttgcgatatcatgttggctccccagttgttggctactttctatggcaaaggtttcgaaaatatgccctatataaatacccgtcccagtaaggaggtattgtcgatgtactttgcctatacgtacgaggccgaaatggacatcaattcggaagataccgtgcgtatcgccatgaacgtgcagtcgggcgccaaagaggatatcgaggcgggctacgatgcctatcgttgggaagtcgtttcgagtaatggggtattgattacgggcaagaccgaggaatatgtgaaaggagagggattcgatgccgtgcttgcgttgcgctcgggttcggaggaaggcgaagccgaattccattgtattactcccgacacggtgttcgtagcgacgtttcgtgtgcaggactttaagactcgttatccggtggaggaaattacggtcgaccacgatccgatttccatgcctgtgggaagtgtgttgagacttacgacgggagtgattcccgcttcgtcttatgcttatcacaagccggtagtcaaggcagtcgatccttccaaagttcaagtgggtgaatataacggtaatgtcatagagctgaggggactcgcattgggcgagaccgagctggttcttacggccaacggcaaggaaaaaagggttccggtgagtgtcaccgagggtatcttgtctgttttgtggaaatcaggtaatgcgcgtactcttttcgagggacagactgtgcgatggggtatcgatgccaaaactttgtcgggaggagagaatccttatgacgtgacttggacttcatctgctaccgatgtgctcactgccgagcaaaccggcgacgataacacacaggggacgattacgggtattaaggccggtaaggcagacgttattgccgaggtggctggcgtatcgtccgagagggccgaggtgaaagtgatcgctctacctgtcgatttggaattgaacgcctccaacaccgtgaaagaaaactcggtggtttatgacgagggcggcgatttggtagtgttcatttcgcccacatcgggttatgggcaaatcatgcttacgttgaccgatgcctataagggtggcggttatgcaggacattacgatattcctgtcggtacggtagtcgatatcgacggagctcgggccgaggtgacgggcagcatggatgtctcgggcagcggcgacgagacaaccgtttcgttctcgattacgggtaatgtgggaagtcgcactctctctatcgaagccgatagtgttcccgtggtgttgtaaaaaaagagtcgtttcgggataggaggccgctaaaacgcctcctgtccgcggaacttgaagatagaaaaaactttttgagaataattcaaatttttattaaccaaaaaaaattttccatgaaaaaaaatctatttttattatctggaattttagttctttcattttcttcgcaagcacaagaattgaaagaagattacatgacgtggccggagagtccgaaactcggtcagtatgttagtagttgggttcccggcgaagatttgttcgaggacgagaatttttatgtttcccgtgtgaaacccaaagaacgttttcgcaatgcggccacgcagatcgacgagacgctcaccgaggccaacgacagaaaactcgttttctgggttccggtaggaaatgccagcaatggtaacaccaatgcgcgtcctaacggtaagttcgattccgaggctttcagtacttggtcatacgttactcattacggagactggacggctccacacgggtgggtccccggtggattcgccgatgtcgcccataaaaatggtgtaggtgtttcgggtgtggcttccgttccttggggaggtataagttcagagtggtcctctggtttttccacgttggtgggcatagaggcagagaaagtggctaaattcctccattatcatggtgtggacggtttaggctataactcggagttcagtacaggttcttcttttattttgtcgggattgcgtgcattgcacgagacagttcacaaataccttacggaaaaaggtaacccggtggtcgagaacttctggtacgatggaaccaacgataatggacagattactttcgatagtggtctcggtaatcataacaacgataccttcggcgatggcgagcatatccgcacctcgctttttctcaattacaattggcatggagtattgggagggttgacccaatctactgtagatacctatgcccccggtcgcagttcgctcgatctttatgccggcttcaacatgcagggcggtgatccttctacgtggaaaactctcaaagactataatctctctatcggtctgtggggcgctcacgattataatatgttgtgggccgaccgtgccaataacggtagtacagatgtagccaagcaaacatattatcaacatctgatcgagcagttctttaccaacggtaaccgcaatcccatcgataaaatcgaggtttacaatcgcggtaaccatcaccccgatgacaagtggttcggtatgtcggctttcatgacggcacgcagttcgctcaaatgggatctttccgaggaaccgtttatttcttatttcaatttgggtaacggtcgtttcttgaactggatgggcgaacgtcagaacgataacgaatggtacaatatcggtgtacaggactatttgcctacttggcgttggtggtttgcatccgatttcatgggtaaaacggccgacaaggtagtggaaaatggcttggaggccaagtttacttacgacgatgcctatgtaggcggttcgtgtctgcgcctcttcggttctgtggacaatgagtatttgcatttgttcaagaccgagttcgctttgtccgcaggcgatgtgattacggttcgttacaaattggtaggcggtcaggccgatgttaatttggcactttctgccaaaggcgacgagcaaacgattttgcgcgagagcggtttcaatgtattaactgtcgccgatgaggccgacgatgaagtgtgggtggaaaagacgtttaaagtgagtggtgctttggctatgttggccggtaaggaaatcgctatgattgccctccatttcgaaaatgccaagaacctcgacttatacctcggtgaattttctatcacccgcggtgctatgcctacaccggcggctcccgagattaagatcgccaaagttcttgcatctcactacaaaggtgtagatggtaaggtgatctttaacatggataacgacaaattgccgggtgagccggtttataacctcgacgtgaatgcttcgatgttcaaactgtatgctcaacaaaaaggtggtgagcctcaattcatgggtatcactacttcttgggccggtatgtatttctctgttcctaccgatttgcagggcgaacaggagattcgtttcggtgtcgcagccgtttcggtcgatatgaagtccgattccgagatcgcatggagcgattatatgagtatgggcgaatatacggttaccgacgatatacagataaataaaactaccatcaagccgggcgagagctttgaaatttcgtatgtcgatccccgtcacgccgctgccgactggaaattgctcaacagtaccggtgaggtcgtaaaagaggcaagtaatacgactgtatttaccgtatcggaaggtattgaagaaataggcggttatgatctgcaagtcatttgcgacggcgaaacgaccacttatggttactatgtgcagattaccagcgaagccgtgggtgcgttgcccgagattcaatcgctgactatcggcggggaagctgtggcagaagatgaagtgaagatcgacgtggacgaggcgctgacgttgggctataccggaaggaaagccaatggagcttcttcgcgcggtatcgagatcaatgaaggctgggtaggcggaagaatgtccgatttgtctatcggtgacggtcaaacgttctccgtgtcggcttgggttcgtttcacttcgatacccgaagggtcttgtttcttcagtgtggaaaatcgcgcatcgagtgcatggccggtgaataactggggctggatgtggtctgacttgtcatctacgggtaaacttaacagttataccttccggaccgctacgtacaatggcgctcccgagttgaaatatacgttccccaatgcagtcgtaacacccaatgcatggaatcacgtggtattgacattcgagtataacgaccagtcgcaattccgctccaaattttatctgaacggtgtgctccaagagtcaacgtgggttttagatggagcttcgggtacgaccgaaacatgggctaatgtgaattattctatcacgacttcagattggttctgttttgccggaggccgtggatcggaacctgttttcaataatggtattatcgacgatctgttggtttggaacggagccatgactcccgagcaagtgcaaaacgtgaagaacggtctggatgccaacagccttccccaagaagtgatggcttactgggatttcgaaaccgatgccgatgaagaccactactttgcagccaaaggttcggttgcaggggctaaagcctgttcgttcaagacggaagctcttggtagtgaaggcgccggtcgtcaagtcgctcagaatcctctgtatatctcaggttgtccgtttgtgccgggatccactttcaaggtagagactcgtccgacttggacagccaaacgcggtgtcctcagcgaatcgaccggtaccgacctcgaaggttccacgaaactgacttatagcaaaccgggcgattatacggttactctgactcttgaaaatacgctcggggccgataccaagagctatcctgtattcaaagtaggcgatgtagacggtgtagaagagagcatggccggtgagttgcgcacgtataccgtagagggtattctctttgtagaatttgccgaggacggagactaccaagtgggcgtgtacaatgcctcgggaatgcttgtcgcacagaaagatgccgctgtcgtagccggtcaaaacatgagcatctctctcggagccaaaggcgtttatgtggtgaaggtgatgaaagagggcaaggtggttcgtacggtcaaagtgttgaatcgatgatgtaatctctcactttctttttaagagggtgatctcaatagcggaccgagccctatcatttagggttcggtccttttaacaaatttttaatcggtagaaaatttattttttttgcgattatttttaatattaatatatcatgaaaaagagttattcgatttttttatctatactgttttgttttttgttttgtagtttgagcgcacaggatgcgcagttgaatgcggcgagtcgtaaagtgattatcgaggctccggcagagcccggtactcatttggaggtggcttataggcctgcgggttcttttttcccgagttatgtgcagtcggggcagcaagtagacgtgggtactacgcttatcatcgatgcttattctgataatccgaccaaattgccgttggttgccgtacgggtgaacggggaagaaatcgaaaaatcgggatcgggatatacgtatgttatacccgaaggcgaaggggatattgtgatttctgcggaattcggtcttctttaccaagtagatttctcttattccttgaacgggcgcatagaactttatgcggcgggttcggaagagccgttgacgacgggaactcgtgtgaacgggaatgtggagataacggtgaaagttattccggacagcggatgcgatttgctttctctcgtcgtgaacgatgaaaatgtaaccggccaactcgcgaacaatgagtataagttcgtattgaagaaaaacacttcgattacggcgtccttccagaaagcctatcgtctgacggtggaaccgttcgagcacggtagtatgcgggtggctatttctgataaaggagatttgagcgatgtaccgtcggacggtaagattttggatgggcaaacgcttatcttgtggtggccgacagtcgaagaagggtatgaagtaggttccgtattgatgaacgggacagatataacggagcagtttttctcaggaatgtataaccatgtggtgaagggcgatgtgaacgttaccgtgacgatccgaaaaaaaacgtatggattgacggttaaggatttcgtgggaggtacgataaaagcggaattcgaagatgagggggtagtgaccgatgtgtcggccggtggcagagtaccggaaaatgcgaccttgaaaatttatgaaccggtacttgatgaaggatacgaattggtttatgtgtcgctgaacggatcggatattaaggatcagtttaaagatggtatctattcgctgacgatgaaagaagatgtgatgcttgttgtaaaagccaaagaaatcgataaaatgttcaaactgactatcgatgaaatcgagggtggcagcatagatgtacaagtgtatgtcggtggagatttggccgatgtcccggccgatgggaacatcaagaacggaaccatgctgatgatttccgaaccggtactcgaagacggctacgaattggtttccgtcatgttgaacgaagaggatataaccgctttgttcgaggaaggcgtgtatttccataccatgcgtcaagatgtgacgatctccgtaaagaccaattatgtttcgggcgtggaagaagaacaggccgaccgggtgagaatttatcctaacccgtttgcagaaagttgcgtggtgagcggtgttgccgcaggtacatcggttcgcgtgttcaacatgacgggagcttgtgtgttctcgaaagtcgccggaacgggtgagaccgaaattcgtttgtcgggacttgcttcgggtgtctatatcttgaagttggagaaagacggcgacagctcttgccataaactgattcggaagtaagagccgatttctcggtcgatagtagaattttttattcgataaacttgtaaatagggaaggggagtgcaactatggcactcccctttttttgacggaggggttgagaagattacataagagttttttgattgcaggttttaaccccctcgccctatgggcactccccctatatcgtttcacgacacagggggagagtgtgataccctcggtttgttgctgtcgcagtttttctatcccctctgtttattaacccctccgtcctatgggcactccccctatattttgtgttgcgccaccccgcaatgttgcggggcacggcagggtgaggagtgagacatctttgttctattgttgtttcggcttctccgttactacgtaccgtctctcctatattttgcttcgtgccacgggtgaggaaggggtgaatgccctgtaatgccacaggacatgggggtggttgagatgtattccgcttttgccccttacactgattttataagcgacacagaggaagaggggtaaaagaggtatttttattcggcagtccgccgaatttgtttttgtattcaatttgtattattttcgccatatgtcattacttgtgtattttgctccattgcaaggttataccgatgtggtttatcgtaaggcacatgccgctttattcggtggcatcgccgcttattataccccttttgtgagaatcgagaagggagatttccgacggaaggatttacgagatatagactttgaaaacaaccggggtgtgccggtcgttccgcaggcgatagcctcggagtccgatgaactgagacgtattgtggattgtatggcttctcttggctatactcgggtcgatataaatttagggtgtcctttcccgatattggcttatcgtcataaggggtcgggtatattgccgttccctgacgaggtagagcgattgttgcggcctttggaatcgtatgactctttggaattttcggtgaagatgagattggggtgggaggagccttcggaggcattgaggctattacctctgcttgaaagtttgcctttgcggcaaatcacgcttcatgcccgactggggaaacagcagtacaagggttgtgtggatatggaatctttcggtcggttttacgatgcttgtcctattccgttggtttataacggggacttgaccacggtagaggagatggttgccgtggagcgggagtttccccggctgtcggggcttatggtcggcagaggattattggcgaaaccgtggctggcagaggaatatggaaatgaaaatttttcgagtgagaacttttattgcagggtggcttcgttgcacgagcgtgtttttaccgattataaaactctattgcaaggagaacatcagttgttgactcgtatgatgtcgttttgggaatatcttttaccagatatggagaagcgattgagaaagcgtttatcaaagtcccggaatgtaaaagattatacagaggccgtaaacttgctcttttcttcgttggagggaaaaaattaaaactgccttcgacctattttacagaaaaattgttatctttgaaacaagtccaagatgggatgcggttcggcatagccagatcggaaatgaaatttccgtttgtctctgcgctcacctttcgctatctttgacaaaagtcactaaaaattggagccctatggaaaaagagatcgtattatatcgtacattcgattctccggtcgaagcgaatatcgtaaaagatgtattggagacaaacggagttccatgttttttgtccaacgagatattttcgagtgtcttgcctttgacaaattcggaagtgggagccatcaggctgaatgtctttgccgaagacgtggagaaggccgatactattttaagtacgacacaacttcctgaatcggaaaagtagcagggtctgagtaacctgtttcgttttttcaatatccataaaaatcgaaacagcttttatgccgcttgttttatcggttccgaattatttccggatagttcggacgaaaaggtttgtttaattttgaatccggtaaaggcgatgatcatagacattaacgggcttagcagattgaaaaagcaataaggcagataagtgagagtgcttactccgagaacggtcgcttgtgtcattccgcaagagttccacggaatcaataccgatgttacagtgaccgaatcttccacggtacggctgaggagccggctttccaatcctctattcttatatagttctttgaagaggtttccggtcagtatgatggacaggtattggtcggccgtacaagtgttgaaaaaaagtccggaggcgacggtggagcatacggcactttttggtttacggacgaaacggacgaaaacgtcggtaatgctacggatcataccgcttgccgacatgacacctccgaaacacatggcgcatataatgagccaaatggtatccatcatgcctcgcattccccgggtggcgacgagcgcatcgatttcgggttgtccggtcgataaagaggtgctaccgaatacggaagtcatcaaggctttgaatccggtagtgaagtctagggtttcaccttgtgcgatttgcaggagaatatgaggttggaagatgagtatgcatattcctgcaatgaccgaggatataaacagtgtgataatggtgggaagttttatgagtataaggattcctgtaatgacaggaacgaggagaagccagggcgataaattgaatttttgcgctaatgtatcggcaaacagggctgtttgttcgtgagcgacatttccctttaagaatccggcaatcgtaaaaattatcagcgtaatgattatcgagggtactgtcgtgacgagcatatagcgtatgtgagtgaaaagtttcgtcccggtggtggacgaagcgagcaccgtcgtatcggagagcggagagattttatcaccgaaataagcccccgaaatgatagcgccggcaatccacccagcttcgaatccttgtgcctttcctatcccgagcaaggcgacgccgatggtggcgatggttgtccaagagctcccggtaatgacggaaacgatggcgcagatgagacagcaagatgccaagaatatctggggtgtgagcgtgtgtaacccgtaatatatgagcgtgggaactatgccactgagcatccatgtgccggaaatggctccgatgagtagtaagatgatgatggccggtgtcactttctttatgtttttagccatgccttcttcgagggaactccatttataattgtattttatcatggctatgcctacacatacggacgaagcgatcagaagcgatacttggcttcctcctaaaagtgcatctccactgaagatagggataaccatagccaacagtgcgacaagaacgaacaatggaatcagtgaaataacgggagtgggtattttgcttttttcgtccatattatttttctttttattcgagcttgcaaaggtaatcataatgcatatatattacctttattttcttctatttttgaataaataaacagtaattattgtatatataaatatttattcattttaaaataaaaaccgaatagaggattcatgctctatccggttttaatgtatatggaaagggaagtgcttttcagaagtgtaacatgactcctgccgagaaactgcgcatttcaggagcatggctttgttgcatgatgttgaaaggggagagttttacatagaatccaaaggttccgtatccaccctgagccatgatgtcgagattgatgggattgacttttatgtttttattgaagtgctgtactttttcgtttcctacagtatatttggttttcatgctgctatatgtctttataccgataaccgggccaagcgaaaagaaaagcggaccatgcaaaaaggttcttgtttgccattcgatcaataggggaattgtcaaatccacagttttcagtcgagagaaatcgaggtgggtgccttctgggcaaggaactatttttatttgcccattttgcttggtgaagtagcggttatcgttcatgacgtagtttctccaatcgagaccgataccggtaataaatccccaattatccctatgtatgggggtaaaaatggtaacgaaattccaaaatatttcgaaagaaccggagaaatcaagagaaatacccgtgggggagtctaaaaatttcatgcctctacccatggcattacagaatccgaaacctatgcccgaccaatgcggatcgaaacgcttgcgtttatctttctttttcccggaaattagatctgaaaacggaaacgatacggattcggaaagttcccaagaggtttgttttttcccgtcaatatggcgtgattcgtaatatttgttgtatttgttcccgttttcgtagacggttaccgaaacgatttcggaggaatctttgatgaggatttccttttggttgaatattacagttgtgtcacgttctgtcgagaatgacggcatgattgaaaagatggcgagtaggagtaagataggatttttcatattcatgtttttttattgtttcttgttgataaatagatttatgagtttgtcgagctgagtttgtccctctaagtagataagtgtcgcatcgtgcggtgacgttttacggaacagaataaatcggttttctccatcgggggcggcaggtggtaactggtaatatccggcaatggtattattccccgattttacggtttcgctgttttcggctttccggctgtcggtagaaaccgcagcttcgaataacgttacatcgtcaggacggtccgtgatggaaatactatggaatagcgataggccgtaagggtgtaacgttttccctttcaagagaacgactatggcttgttcgtctttgtcgtatttccctgaaaataggggagcgatagctagtcctttttgggcgtgacaaatattgccgatccaaaggaaaatacaggatatgaatattttataaaacattttcatagcagatgagtttattgtaaattttcgagaggcctgaatatggaactcagttctttctccacggtaatgtcggttgggtcgaactgggatacggtgtgtttcatttgttcgataacggtttctgtatcggtgtattttttcccgtatatataggtgacacaaatgtctcttggagagtgaaaatagaggatatttatactcagaataatggctatacaagcagcgatacgagcaatcatttttagcgccacccgttgcctgctttgtattttcccctttatgctgttgcctattagcgagtatgaaagtacggctcgtatttcgtcgtaacgtttattttgagactctgagaatacaaatcgagatagttctttctcttcatcgatagtagtgtttccactgtaatagcgttcgatgagcctatcccaatagtcggaatttcgtttgccgtgttttatgtttttatcggtcataggcgtttagttttttatattgttctctaatagtttttctcgctcttgataaattcattcggattgttgccggttgcatattcaatcggttggcaatgtcttctatttcgagaccttgatagtctcgtaattcgagaatttttctttgattctcggttagtcttttttcgatgagtagttttaccgtttggaatctttccaatagattttctttttcactgttatcttcatcgcattcgttattggtttcgatgtccaactcggggaatcgagctttctttctaatttggtctatacaaatgttacgagttgtagtgactgtcagagccgctgcttctttttcgcttttaattttatttcgtataggccatagcctgcaaaaagcttcctgtatagcgtcggaggcatcgtcttcattttgaagaatatgacgagacatcgataacaggttgtcgcgcagacgtgtgaatgccgataacaacggttcttgattcattatttaaataatgtattttcttttttgattctgtaaaaataacgaaccaagtgccgttttgtaacaaggaaaaagaaaaatatttaatgataaaaaggaaaaatttattcttgtggggtttgtggggatagctggtggagtttatagaattcagaaattgaatcgaagtccggcttgcagattgatgttaaagggtttttctttacgaatggtcgaaatgtccgatccatcgtcgaagtaatagacaataccaggctcggcatagaggcttatatgcgatgccagtttgaaagatattccggctgatgccaatacggaccactgcaattggtttatgtgcagagtctcgtcgttggaaaatggcggacgattgttcatttcgtattgtgcggagagttctccgtgaacacatttttccaacattccgcctcccgataggtagagattgaaatagcgcttttttaagaaattccagtttagttttaacggtattcccaaatagtgtagttgctggttttgtgtatagtatgcagctcctccggcagtcaagtcggacgaaagataggtatatacaagtcccgtttctaatgccagtcgattgttcagttctttctggactgtaattccaaccgatacgggaaagtggtgtttaatgtctgttttgggttggctattgatattttgcagcatgatatgttggtagggtgttgttaccggcccttcggagttcgaaagatttttttcggaagggagacttgccatttcggcagaggcataaggggctaaattgctgaatccatttcgattgtcggctgacgcgattaggttattccccagagatacgcccaaagaccaagtgcttttgggtttggttttgggttgtgtatgcgtatgtatggttgtcgtgctggtattctcatttctcgatggaaacaagctagtctgtgcgttatttcgttttttccccggagttgatttttccggttcggaagattccggttgttcgatgtgtcgcgattcgtttatttgagatggcgtatggttttccacatcggtatggtcgggtgtttgcggtgctcgtatcggtttataagattgggctattatatcgagtggttcctgttttatcgagggtacagtattttgcattcgagatacttccatttgctccgagccggatatttttgtttgaagcgggagattgtttaagtcggtagtcggacggaggaattgtaacccgataaaagtacatagcaaaagtgtaatacaagcggctgcccaccaaatggttcttttccgaaaggggatacgacgtggagcgagctctttggaaagttcttcccaaacttctggcggaggagtaaccgaatattcatcgagctgctctttccagctgtctgtccaatttttagttttatccgttttcatattgtgcccaatattgtttaactcgattcatcaatatcgttcgtgcccgatgtaattgtgatgaggagcttttttcgtttatatgaagcaggtttgcgatttctttatgtgatttgttctcgaatgtgaacagattgaataccgtgcggtatccgtccggtaattccgaaatgaatcgaagaagcgtttcctgaggaatgttttttacgattttgtcgtcgtcttcatattccgggtcggctatttcgggagcggtttcgatgtcgagctcgatatgttgtgtttgcttgcgaatcgcttctaatgctgtatttaccataatacggctcaaccatgcttttaatgagccttcgcctcggtagaaaaatttatccaaagaggtaaaagctttaaggaacccgtcatgtaaaagatctttggcgaaatctctgttcccggagtaacgaatacaaagtgcgaacatttcaccggcatagcgttgatacagctcgttctgtgccgtcatatctttccgcttgcaacactctaccagctctgcttcgttcattttttgatgattcctgttatttattaaatgcaacgatgtaaaaatactgcatgataggtgatagaaaaattgtttttaactctttaacaaaattcggtgcagtatttttgagtggtctacgtttaccccataaaagcgaataaactaaaaaaacagacgaatatgaaaatgaaaaagtttttattggtaggattattaggtgttgtgacattgtgcgggttgtcgtcttgtggcgatgatgacgatggcggatacgttccgttttcctatgcggtgggcgatatggtcgtaaaagacgggagtgagccatatatccagttggatagtaagcaaacacttttcccgtcgaatggcagtcgtttgcctaattatttgttgaaagatggaaaacgggtaatcgtgaacttctcttttctcgaaggacagcgggagggatatgattattatattcttatcaatgatatagattctgtgttggttaagaatgttattcccatcactcctgaaacgaccgatagtatcggtaacgatcctgtgaatgtgttggatatgtggacgagcgataagtatctgacggttcagttcgaaatgcgtggtcttggtcgcgagaaacacatgattaatttggttaggaattattctttatctcctaatcccgatggagacggttatttacaattggagttgcgtcataatcgtttgaatgatcctgagatagaccatattttatggggggtggcttcgtttagattggaggatttgaaactggaaaatcccgatttgaaagggttgaaaataaaagtacgtagtccttatggaacggaagttcgtacttgtgatttcgagaaggaggattcaggagaggatgcaatttctggaactcaggagaagagtgtttctacttatgtccgatagaaatagttaagtaaataggtgttgattgccgggagcagaatggatattttgcttccgttttttttttattgtgaaataaaggcttataagttttttggataggtacaaaaaaaattgattgtctcacgacaaccaatctttgttaaccttaaatctaataccatgaaaaacacattgcaaatataggggtaaatatgttctcaaacataatatttagacaataattttcttggatttaatttgttttaactaatgtaaatcgactcagtcgtaaatgtatacggtctttaacatttttggcgagactgtaaacaaatattcgctgttcccggatatttccttatattagaatgagataggaataattcaaaaaggggaaaaggatttgtttgttttatccttttcacatttttcgtttgcggtgtcggacgagtttgttaaagatggactgtattcggtatatccaaataaatttgtttctgctcttggtttacattatctttgtcataacgaagataggatgcggctcggcatagtcaaaacggaaatgagattctcgtttgcttctgcgctcacctttcactatctttgtctattgttgtacgagtggtaagaattaaaataggtattagatttaatacccgattaaatgaaaaataaatgaaggtttccgatttgataaagaatagcgggagtacaggattttcatttgaaatattgcctccattaaagggtagcagtatcgagaaatcttttaaagcgatagacacgctacgggaatttgcgccgttatatattaatataaccacacatcgcagtgaattggtttataaggatacccccgatgggttgtttcgccgggtctcggaacgtagtcgtcccggtacagtagcggtagcggcagctataaaaaataaatatcagatacccactgtccctcatctcatatgcagtggctttacagctctcgaaacagaatatgctttaatagatttgaattttttggggatatgcgatttgcttattttgagaggtgataaggctaagcatgagaatcgatttatcgctgcttccggtggatatgaacatgctattgaattggagcagcaggtgaatcgttttaatgagggttatttcatagatggcactcgaatggatttggtcagtacaaggcaattttcatacggagtggcgggttatcccgagaaacatgacgaatctcctaatcccgacgaggatatgaagtggttgaaggcaaaggtggatgcgggagccgactatatagttacccagatgtttttcgataacgaaaagtttttctcgtttgtagaccgttgtcgggcagcagggattaccgtacccattgtcccgggattgaaacctatctcgaaggcttcgcaattgacattgttacctcgtgtatttcacgtagatatacccgatatgctggttcgggagattgttaagtgtaaagacgattcgcaggttaagcaggtagggatagattggtgtacagctcaatcgctcgaattgaaagcgaagggagtacccagtattcactattattcacttatggcggtcgatagtgtttatcaagtggcgaagtcggtttattaacggagggatcgcgcgatgttttttaaagacgttatcggacaggaggaggtaaagcgaagacttttacgttcggttgacaatgatcatgtggctcatgcccagttgctttgtggcccggagggtgtcggtaaatttgctatggctatggcttatgcccggtatatacattgcacgaatcgtcagaatggggatgcttgcggtgtatgtccgtcttgccggcaacatacggctttgactcacccggatttgcattttgtattcccgatggtcaaagtggataagaagaaacggatatgcgacgattatttgcccgaatggactgagtttttgaaggagaatacctatttcgggatcgattcatggttgaggtatattaatgccgataacaagcaggccgtaatttatggagaagagagtgaaagtattttgcggaagatgtctttaaagagctatgaatctccgtataaaataatgattatatggctgccggaacgcatgaacgacacttgctccaataaattgttgaaattgctggaagagccttatcccggtagtgtgtttttgttagtcagcaataatcccgatagagtgctggggactatacgttcgcgttcgcagcttatcgagattcgctctttgtctacatcggttatagccgaggcgttgcaacgccggtatgggataacggagcaggatgctgtttcggtggcccatgtcgcagagggtaattatttgaaggcttgcgagtctcttcaattgaatgaggagaataaattgtttttcgattattttgtgcaggtcatgcgtttggcctatgctcggaaaataaaggatttgaagatatggagcgaggaagtggctgatttgggacgcgaacgtttgcgtcgatttctttcctatgcccaacgaatgatacgtgagaattacatctataatttgcatgttcctgcattgacctatatgaatcgggaagaggctcaattttcttcgcgtttcgctccgtttattcatgaacgtaatgtacaggctatcatgaaacatttgagcgatgccgaaaatgatgtcgggcagaatgctaatgccaagattgttcttttcgatctatctataaaacttattatgctgttgaaaagctgatgaggagtcgtgatgtgaaatgaatgtagaagagtttagggaatattgtctttcgttgaagggtgtggaagagaagatgcctttcgtgaatgttgccgatcgatatagccgtgatgttttgtgtttctatgtgggcgataaatggttttgttttgtgaatgtcgaggtgttcgatttttgttgtattaagtgcgacccggtggaatcgggcgaattacaggctcgttatatgggagtaaagccggggtggcatatgaataaaatgcattggattagcgtttactttaatcgagatgtttcggacgagatggtcaggaagttggtgaagaaatcttatgatatggttgtcaagcgtttgaatcgtaaggagcgggaaagactattatagagagatatgtctatttttttgaaaaaacaggtctttttctattgaaaaaatattatctttgccgtcccggatagaaaacaccgggaaactaccactggggctgaccggttttgacagcgggtagaagtggtgggtaagcatgcagagcgttgttgccccgctctataatatcagacaacaaaaatttaactggcgaaaataactacgctcttgctgcttaatcgaagtacagtagattagcttaatctccgcaacagttgtggagacaagacatcacccggttgctgttgttccgaagcgttccgaaacggtggtgcaataatatcggaaatagtcagaggcaagtttcgagctgatgatgaaaatttagaaactaaggtgcagattggtggcttcggtcttgtctgtacccgacaatcaaagcgaagataagcatgtagaaagctcattagttcctcgtttggacgagggttcgaatccctccagctccacgataaacattaagagacagtgaatgctaacggatagtactgaattgaaaaggttctgtccgtttgttgtatctgttgagtgtttttaaagtctttctttcatatcgttgttgagaagtcttttaatattgtgaaaaataaaagagcgatggctggtaaaaaagcaaacaagaaacaggtgcacccacatctttcgggagtacaaaaagccgtagtgtcttttgccaatatgtttgaggaaaaccgtcgtataaatcgagaggtgcaacgagtcattaaaagaaaaacacctcaaaaagtcaggactatactttatggaaaaagaggtaggaggattgaagagcgtttcttctgtgttgtctgtggaagttcttatggggaggggtggagatataaattggaggaggatacctatttgtatttgtgttctcggtgtaaagaggtcgttcggccacagttgacggtaaaagccatatattcatcgaatttcgaagttcaaagaaaaaagcattgaggttagttattgtggtggatagccgataagtttactataaaaaaagaatccatatatgtatatggattcttttttacattatccccaattcttatttcactcgttcataataggggagacgatcgagggggacatctatctctatttttttcggacccttgaatgtttttccttgatcgtcgcgccatgtgcctttgggaagatatacggtacgatgagtgccttcggtaatcatgggggctatcatatatttgtcaccgagcatgaactgatctttgcattcggtgaatccactatgtggaaaactgtattccatgtggcgtaagacaggctctccggtcttggcggcatggcgggcgcattcataaatatagtcgcccatcgtgtgatgtagttgtgcgtatcgtgcgcagatttccatattcttgcgactgaggattctccacggggcaaccgagaattgcatcataggcatgagggcatggacttggcatgatcgtacaatgagttcttggttaaattcgtcttctttaatgtcgagaaaagaggcgaattgtccacctccgatcatatcgggacaggcatagggataaccgagcataccgcaaatagccatgttgggtataagcatggatacggcataccacgaatagtctttgtctcctatgcgttgcactaagggcaggcctccggttttccaagcggctcgaaattcattgaaagggtaggaaagtcccagctcggcccatcgttgggagaaaatgttttggtcggcattcttgtcgtagtagtcgtactctccgttagccaagatgactatatcgcctgcgtcgaatttgaacccgtcgattccgtatttttccatacattcgtttagggtttgttttagtgattcgacagctgccggattggtcatgtcgtagcatgcactatatccgttccaccaatttacaacggcaggtgttccatttttgtttttcaggagaaatcctttgtctgccaaatctctgaactcgggagaatcggccgatacaaagggtgaaatccaaagcatgactttgaatccgagccggtgcaattcgtctgtcatggcacgggcatcagggaatttttctgctttaaattcgaagttcccataatagcgttgccagttgtcgtcgatcatcaagattcctttggggaatccgttctcgatgatgttatgagcgtagttcagaatgtcttcttgattttgattatacatgagttctatccatgtattgtattgtggttctttaaaaaagagtgctggcggagtttttccgtttgccgggaaatgtgtttttgaggcatgaagataggcatcgcgaaggtttttcccagcggttaccacttgtggggattcgtgatctgattcgataacgatcgtgtcgtttaccaagcgaaaacggaaaggttcgtcactccatacataacgtccttgcgaagataggagcaggggagaggcttcgttattaaaattgacttttgccaaatcatagaggggggtattcgatgcaaagggcatttcgttacctattcccacgaagcagccccaccatttttcattatcgatgggtgcgatgtgtttggtgtatggttgggcttgtagaagaaaaaatgaacccagaaggaaagtgagtaatgatatttttttcatgatataatatattaatgtgtgcacaaatctacaaaattttcatgaatcggcaaaagcctttattcctactctttatgtttgaggtaggggagatatgggcaggaatatgtcataaatcgaagtagtgaagtattctttttagttttgtcttgttcttttttggggttaaaaaacaagagaggtaatgcatgatttgcagcatcacctctctttatgtggtttatttctcttatagatttttatttcttgataaatttcatggctttgtctgtattacccatcgttattttaacgatataacagcctttcgtcaaatcggcgacatttacaggggtttcttccgtaactttaaccaatttgcctgtcaaattatatatggcaatggtagtatttgcgtcgataccgtttacataaagtattccgtcttggtagtagagcgatatggactttatgttttctttgtctatgcctacaatcgtcccgaatgttacgttataagtatggttgctgtctatggctcctatttcgtaaatattgttactaatttggtctaacagcgattctccattggaagaagtgaaagtttctatcttataattttcttcggggataaaagttagtttgacaaatgtgttgtttagaatttcggaaccactggcatatacattactttcgtcgtcggagatggtgacagaaccattcccggtaacattgcaagtaactctccatgtcggtattttcgagaacacagcacatattgtcatattatcggaaactgcgtttactgtatatatgttttctgcaagttcgcctatcttttcttcttcgttcacgaggaatgacgttaattcatatccttcgtttacggttactttgaaagttagttttgatcctcgtataatttcagaaccgaatgcggtcgcttcttcggcatcattaacgaacatttcgacgttaccaccggttgcggtcgtattggttacgattactttattggagaataccactgttacttctgtgtcatcttcgatgacaaaagtcgttccgctatttacttcgccatttaccaatacttgcgataatacatatccttcttccggttcggctatgactgtcaatgcgctgaactggtctaccgctccacttgttacttcttcatttttagcattaactactttgaatgttcccccttcggtgggttgagtgatggtgagattattggttgggaatgtatgaccggctacgatttgtacttgaataaagtcgcaagtataaacttctgcgccccagtggggagcaccagtatgtacctcggttgtaccttctactacaccggcgggacagctaccgaatgttcctttgttttccaattcggcttccgaatcattttcgattttgtaataggccactaattcttcgggcatattctcttgggcgtaaccgccgcgaatggattcctttacttctttttcggtcaatgtttttgtccatacctgaacttcgtccacatagcaagagaatccgccgttccccacgaagaacacacactcgtcttgcaatagaccaataccatgaccttcttgtgttcctccttctacgattgtccctaaatcgccagttcctaataatttcccgtttttgtatagtttgatttctttattggtgtcatcgactgttacggtaataaaagcccattcatcggcagtgagcgtagcgttggtggtcacttcggctattcccgggcagttgcctttgtctttccatgcgcgagctttcattttcaggactccgttttcgagtacaacgccaaatgttcctacggctccatagtaaggtgcttgtccgtgtcccattacttgcccgtttgtactaacggttttcacccaagcggacattgtgaaattgcgggcacgatggtctgaacctgttatattaccattattccatgagttattctctccatttgtgtgttcgcctaatactttatcatcaaaacggaattggtatttattattaccacttattgcagggactagtacggctttgggaccttcgacttggaatgagactgtgacggtcgtattttcgttcaccgtgtaattatctccgttggtgaaatcggatccgtttacttggagggagagaatttcataaccgggatcggcagtagccgtaattgtcaataccgtaccttcttttataccggtgttctctcctgtggtaagggggtcggaaccgttcattacgcttagttgtccattttctaccagagtcggtagcgtaactgtgtaataagtaatatcggtcaagttgacaacgatagtcgtgttttctgttaccgtgaaaatgtatgatccgttttcttctgcttcggctggttgcccgttaatcagtacggattctatcttcttgttttctggcaatgaattgaatgttagggttaattctgtgccagaggctatcgattctaagttctcgataacttcttctcctgctgtaatttgataatctactccttcgttgacagtaattgttactttatgcataacgatttcgacaaatgaaacagtaatagttgcatcttccgttacagtatatgtcccaccgttttcaatcggttgtccgttgatattcaaggattccaaacgataattatcggccggtgtcgccgttatggttaaagtagtccccgatgttacggtattttctcctgccgaaagagggctttcgccgttcattacgcttaaagtgccattagttatttcagtgggtagtgttactgtgtagttactaggagttggtcttcctttggtaagagagggaacggcttctgtatagttggtgatactgatatatccaccatcactgtttgtttgtcctccggtgagattatagaatgtagcctttgtatttacttggtcagattcggttactttgttggtaaaagaactgccttcttcaattgtattgaagtcataccaaaccgtcagtcccgatatattttgggggttgctgtaagcttgcttgacatcatttgagtttaatgctcggtcgaaaaattggaattcgtcacagaatccggaaaatccagcgccccctacaaagaaaatacaagggtcgtctccgaaaagttctaactgttgagtattgtttttcgtggctacgagagtaccatctttatatacacttaccgaaaagtcgctgttgtcatagacaagtgtaagataagtccatgtatccagatctaccgaggtttctaaaaccgaagttactttgttgcttgcacctgatatgattttaagaacacctgtttcggtagtagctaaaactaaactaccgttgtaattcatatgtactctaggaccgtgtcccatgattacatttcctttactgcccgaattgtttgtatattggtccatatttatccatgcagatatagtaaaggattttccggaccggtctgtttcacctccatttctgtctcctaagattgtttcggggatttccaaacggtaacccgatgtaggagaactaaaagagagctgaggaatagtgatcgctttgttctcttcggcatagctattaagaaaaggcagaagagtaaacaataaagtgaataacatgtagtgttttttcatgataaacaaatatttaattaaacaaaaagtaattctgaaaattgaatgatatgtttttattttttcatgatatgtatatacatatttttgagcattttttatgcgctatataatattaaccttaaatcgagggttatccctagtgaaaaagtgaatttttttattttttttgagaaagtagaaaatgaatacgataagaatcgtgcaggtgagatgttcttaggagcttttttatcgtgttaagagaactattatagaccgattggcgattgtttggccatgttactccccctctcccccctgtgttttgctgcgcaaaatataggggcggtttcctctggacggaggggtagaaaatacagggggaggtgataagagcttggtcatctctccctgtgctcatcgcagatgagatagggagagtgcccgatagtgttatggggcacgacaagggaggagttctaaaatatctccgataatgaaaactgaaatatcccgtagtattacggagaacagtgttcgcaataggggagagaatatacatgaacgatccccgttaattaacgactgagccgttaaaatacttttgggaagaagaaaaataaaaacggagtatccagtgagggatactccgtttcaatatgctgtctaaaatatttattcagcactttcggatgcaggagcttctgcaacggcattagcttcttcttcggcttttgcagcggcttcggcttctgccttagcggcagcctcggctgcttttttagcagcgacaacttcggcttttgctttgttcttttcggtttcttcttctagacgttttttagcagcagcgtcttttgcggcagaaactttggctttctcagcgtcaatagccgattttttgttcttcaaccatgcttcgaagcgttgttctgcaacctcttcggtaaaagcacctttttttacaccgcccaataaatgttttttcatcaatacaccttctttggaaaggatattacgtacagtgtcggtgggttgagcaccggttgtcagccaatacaaagctctttcgaaattcaaatttattgtagcaggattagtgttcggattataagaacctatcctttcaataaacttaccatcacgtggtgccctgctatcggcgattacaatttggtaaaatgcgtagtctttgtgaccaaagcgttgtaatctgatttttgttgccatttgaaattttttaattggttattatttgcattagcggcgcaaagatagtatttctttttgaaccgtgcaaataggcatgcgcctaatttttttgagtatgagattatttcgtctcggatagcaaaacgtcttgccataactcggcattgaatccgaccaagacctgtgagtctgttacgagaaggggacgtttgattagttttccatcggaagccaatagttctatcagttctttttcgggaattgtactaatacggtttttcaaatttagttctctatatttttgtccgctcgtattgaagaatttttgtaagggtaaattgctgcgggttatccattcggttagttccccgacagtgggcggtgtttcgacgatgtgcttcgattctatatcaatgtcgtgatcttttagccattttgccgcttttttacaagtgctgcacgaggggtattgaaaaaataaaattttcataggtatttgtttttagaaataatttttgaatgacaaagatagcgaaaggtgagtgcagaggcaaacggaaattttatttccgaatggactatgccgaaccgcatctcatcttcgtatttacaaatgtacaaaaaggcattgttaatgcttcttttttattttcgctataataatattatagtttatctttgccatactatcactttttataagttaaaaataaaaaatggcttataccccgacaaagttggttgggatattgttttggctctcgatgtgtgattttagatgaactgcttttaataactgtgctatattatgaaacctttgtatcaagaacttccttttgccgtcgataattatatcaatttctatcgggaagatttgccccattttatcgtgccgtggcattatcaccccgaaatagaaatcatgtgtattgaaaaagggtggggcactcgttttgtaggtgatcatatcggaggatatgaagagggcgatgtttgtatgatgggtcctcagttgccgcatgagtggagaaacgataaagaatttttcgactcggattctggtttaagggcgacttgtcattgtgtttattttcgtaaagagttgttcgagggtatattgatacgattgcctgagatggcgaatattcgtgagttaatagaacgttcgagacggggaataaaatttaccggtgaatcgcgtgaacggatcgcgcgatatattcgacgcacgtttaatcaaaatggaatcgagcgggtaactaatttactcacacttttggaaatgatggcagaagccgacgaatatgaaattttagcgagcgtaggttttacccagtcggtcaattcttcggattttgagcgattcaataaagtttatcgttttttggtgaaaaattttaataagccgattaaacttgaagaggtggctgctgttgccggactgactcctactgctttttgtcggtattttaaggaacgtacgaaaaagacttttgtacagtatttgaatgatatgcgtatagggcatgccaagaaatttttgatagaaggcaaaatgaaaatttcgactttgagtatggaggtcggatttaataatttgtcgaattttatagagcagtttaagaagtcaaccaacatgcttccttctgaataccaagaaaaatatggggtgaaaaagaaaaagattatctgataattagtgcgattccattttttttaagcctatatctgctttttggagagaatatttataaaaaaaatgatatttgttctaaattttattgatagttcgtatatttgttcgacttcaaagtttgatatatgcatgagaattatataaaagaattacaaagaggttcttattctgattttaataatttgtataatctttatgtggaccgattatatggattcgtttataatcttacacgttcttctgatatgacagaagaaatagtccaagaagtttttttgaaagtttggcaaattagagagcatatatcaccagattattcatttcagtctcttctttttacaattgcaaagaataaatttctaaatagtcttagaaaacaagtagaattgtattcatacgatgagtatattactcaatttgataatgcttcgtatttagagaatacaacagaaaatgatttgtctttcaaagagttgaacgaaaatataataggggcaaagtctaagttgacctctcgtcaaaaggagatatttgaattgagtaaggaggagaatctttcgaatagggagattgctttgcgcctacatatttcagagcaatctgtgagaaatcagttgagttgtgctcttaaagtcatgagagaagagttgataaagaaagggctttacgtggtctcatgggtattttggttattggaatgttaaaagaaaataaaaagagacgtttgtatgttatatagtgcggcgtttggggtattacttatgaatagtcatttagtatgaaagagcagaaaaagaacatactcgaaaggtatatgcagggcttgattaacgaagaagaatataatgagttctcgcaaatggttctggacgaaaatgatgaaaagatttttgacctgatggacgagtgtatttgcaagaatacgaatgcctatgttatgccgtctgatgtgaaattaaacttgtacgaccggatttgggaacagatccgaaaagaaaatatccgtgtgcggctgcggaagatatcatctcttgcagcttctatattgctgcccttatttattttttcgacagtatatttctattttcaggtcgatgagtataaacataggcctaatgttattgttgccgagaatggccaaaaagccgaattcacattgcccgatggtagcaaggtgcatttgaatggcggttcaaagctatcgtataatgcagcatataatggacgtctgcgggaagtctctctcgaaggagaggcttttttcgatgtaaaacaagacaaagaaaaaccattcatcgtgaaaacctcggttttcgatgtggaagtattgggcacttcgtttaatgtttcggcctatgacgatgaagatatgtctgaaatcacgttggtggaaggaaaagtgaaactttccttgaataatagtgatgattcgcctgtttatttgacaccttcgcaaaagttcgtgtattctaagaatggtaaggagggacatatctcgtttacagacgaggagtatgaattggcttggaaaaaaggtgtgttaatgttcaacgcagagttgattgaaaatgtattccaaaaaatagaacgttggtatggagtttctatccattatgaaagtgacaatatcattcacgatcgctttacaggtgaatttgaagctttgactatacaggaaatgatgaacattttacgcatgcactataattttaaatataaaatcgaaaataatgacatatatataatttagaaacaagatattcatgaaaaatacagattcagttgtggtaagtgccacgatttgagtgtgatattatatttgccgttcgtatatccgtatttacattttgacttagatgaagttttgaaagggtattaaagaatacttttttagagagtcatataccctttcgtgaaattttatcaaggtattgttttgtgtttttagtgtaaaaaaagaaaaaattatgagaaatcaattattgtacggtggtattctcttacttgccacggcgtgttcatcgcctaaaaatttttctgttgaagacggaaatacgtttatcgttattgacgagaaggcttctgttccagctgttttggcggctcacgagcttcaacattttgtgcaacaatcatcgggcatagaattgccgattgttaacaatgcaccttctaacgggtccaaacttatttgcgtaggtaaaagcccgtatactgcggagttcgataccatgaagttgggcgagcaggaatattttattaaagtatcttccgataaggtcgttcttatggggcaagatgaaaataccgatagagatgacggccgggataataatggtatcaccccgtcgaaagatcgtttgaaagtaaactactctcagctggtaaacgatacagccagtcaaatagaacttgtacttccttcggtttatgatgcacagggcacttgttatgcggtatatgactttcttgaaaaatttgttggtgtcagattttatgggccgcatccgatgaatgtagttgttccgcagcaaacgaaacttcaactccctgtttctgagataagaagaactcctgatttgaagtatagagtcggtacttattcttttgaatggcccatgatgaaagaccagtatttcaagccttcgggtgagatgtggcaactttttttgagaagaatcaagttcggtggtgaaaagtgggccgccaatcatgcatttacttcttatcaagaccggtttttgaaaaaaaatcccgagcatcccgaattgttcgaatcgtatcaccccgaatattttgcgcagggacgtaccggaggccctcatgaacgccagttttgttacactaacgaggctttcattcgacaagtggctcaggatgcccgagactatttcgatggaaaaccgttgaaaggatctcaaatcgcgttgggagactattttgcagttgtacctctcgataatgcctattggtgtcagtgcgacgagtgccaaaaacaacttgccatcgatgaggggaatattcgtggagagcatttcaattgcggaacagcgactcattatctttggactttcgttaataatgtagccaaagaggtgaagaaaactcaccccgataagaaaattgctgctttgtcatatcatgtctatgcttatcttcccaaagatatacaacttgaagataacatatcggtagctccttgtctgcatccccgtaactattgggctcccaaaatgaaagaaaatgagttggctttctataaagactggattgcggagagcaaagaaagcggacgtcccatatatttatggaattacctttgtttccctaccgaaagaggtttgattcaagatttcaacgtatttcccggattcaacgtgcatgccgtatccgatcagataaagatgtatgcccaagatggtgtgagaggtattttcctgtgtggaatcggggagcagctcgatttctatgcgacgatgaaattgtatgatgatgctcagacgaatacagacgaaatggtcgatgaattctttgccttgtatttcggtaacgctgcaccggccatgcatgacttttatgataagatagaatcggtttacgccaactctgttaattatcctatggatattcaaactcgtgaggcacaattccaccaaaccgaagagatcgcatggaaatatttgggaacagaaccggttatggaagaacttgccggatatatggacaaggctgtgcagttggcttctactccgattgaaaaagcaagagtcgagtcttggcgcacaggtgtgtgggaatatatgaaagctgggagggcaaaatacttctcgaaacttgaaaaataataattaactatgaagatattgaagtttttatcgctcctgattttttcaggagcgctcttcggtagttgctcttcgaaagataaagtgggggacgaacagatccgtattatccctttaccgaattactatcagtctcagcccggtgtgtttgagatggataaaaatacggtgataggtgtcgatctttccgatacgaatatggtttccttggcaaattatttgaatgaaaaattcatgcggacaacgggttttggcctctctatcaagagtgcctccgagggaattgtctttacgcttgtcgaagagaacgatttgggagaggaaggttaccgtatgtcggttacccccgatggtacacaaatatatgcgaatacatatcacggtatttttaatgggatacagtcttttcttcaattgcttccattggactctaccggggatatagctaaaataaactgtatagatattagcgataagcccaggttcgcatggcggggattgatgcttgatgttagccgtcatttttttactaagcaggaggtgaagaggtttatcgacttaatggctgagtataaatataatgtgttccattggcatctgtcggacgatcaagggtggcgggtagaaataaaatcgttacctcgattgactgatgtaggtgcatggcgtgctcctcgtgtgggaaactggtgggagcgagagcctcaatcggttacagattctctgacttacggaggattttatacgcaagacgatattcgggaagtggtggagtatgcccgtgagcgttttatcacggttgttcccgagatagatgtgccgggacatagtatggcacttcttactgcatatcctgaaatctcgtgtacaggtggcccgtttcatgtgaatgtagggaacacgttctataccaaagaagagaattctctttgtgtcgggaaggaaaaaacgtttgccatactcgatatgatattcgatgagttagtggatttgttcccttcttcgtatatccatataggtggcgatgagtgttacaagggcttttgggcgaaatgtcccgattgcagagctcgtatgtcgtcgaagcagttacagaatgtcgaggaactacaaagctatttcgtaaaaagagttgcctctcatatgcagagtaaaggaaaacacgtcatcggttgggatgagattcttgaaggaggattggccaaggatgccattgttatgtcgtggagaggcatgaaaggtggcgtggaggctgcccggcagggccatcgtgtgatcatgacgccatttgagcattgttacctcgatctgtaccagggagaccctgccgtagagcctaatacatattcgatgttgagattacgagactgctataagttctcgattgtacccgatagtatcgatgcctcttttgttttgggaggacaaggtaatttatgggccgaatcgattcctcattatcgtcaggtggaatatatgacttggcctcgcgctatggctatttcggagacgctttggaatgagacggactctcgtaattgggacttttttatccaacgggtggagagccaatttagatatctcgaccggttgaatgtcaattatgcccgaagtatttatgatcctattatatcgccttccataaacgatggagagttgaagatagagttgacgactgaaattagtgggttggatatattttatacatttgataacacaaatccggactgttattccaacttgtatactacggctctcactgtccctaagaatgctactatgttaaaagtagttacttacaggggaaaatgcccaataggaaagcagataaatcttacaatagaagaattgaaggaaagagctaagaaaaaggaataagtgcgttttcattggttggtcgatgaaaccgcatggaatgaaaggaccccgtctgatagataacaacgacgaggtccttttttcaatattcaggaaatctccgatggaatgatatgccaagcatatttacagaatagatctttattcttagatgaatggaagaaaattacatatcatgtttatatattataatacggatttatgtatcaactctctcagctctctattgaaggattcaatagttattgtccatagtcgttgcttatataatattagtttttacataatttatggcttggcttcctgctacgaagtgttttataaagttattattaggcgaaagagctaataaataatcattagagttgatctggataaattgcacatttttatttgtctactcctgttttccacggtttttataaaaatgcaacaatatgttgtataacatataaaagcaggtgttacgaaatgagattttttgtgtattattattgaacggcaaaaataaaaaacagagagattttaaatttagttaagtaaagaagtaaaattttatgaaattgtactcatgaaacacattgtattaggccgtaggccagtatggctgcgctcaatcttgattttatttttattgagtggagttatattgagcacgaacgcgcaagatcctcatttatcgatcgacttaaataaagttacgataaaacaattttttgatgaaatacagcgtaaaaccgattatacattctcttacagggaaggtgtattggataatgacagagatgtggtggtttctgcaaagaataaaagcctatccgaaattcttacgtcggtattgaagccgaaaggcctgagcttttctattcaggcgaaatcgattgtggttacacggcagactttggctgcccaacaaagtacggtgaagggtcgggtagtaaatagttctggcgagcctcttatcggtgtgacagtatattcgaaagataataaaagaggtgttgctaccgatatcgatggaaatttttcgattcgagtaggtagcggaaaaacttcattgcaattcacttatgtgggatataaaccggagacggttcctgtgaaaaatagagattttattgctgtgaccatggaggaagacagccatatgctgaatgaagtggtagcggtgggctatggtgtaatgagaaaaagtgacctaacggggtcggttaccagagtgggcaacgataaaatcgccaatacgccgacagtacgattggatcaggctttaacaggtaaagtgtcgggtgtacatattaccaatactacgggagagccgggtgcggccactaatattcttattcgtggcggtaattccatatcggctagcaatgagcctctttatgtcattgatggatttattggtgcgggggatttgaacttgattgacccgaacgatatagaatctatagagatattgaaagatgcagcagccacttctatatatggttctcgtggagcgaatggagttattatcgtgactacgaaacgtggttcggaggggcggaatgatgttacagttaatgcctacgtaggtgtgcagcaaatcgctaagcggttggagatgctgaatgcccgtgaatatgctgtaatgttgaaccaacaagatgtattgtcgaatcaagaaccttctattgaaaatccaagcgtgtatggcaaagggaccgattggcaagatgaaatattgcgactggcttttatgcagaattatcaggttgccgcctccggtggaaataaagatgggcgatattatttatctctaagtatgttcgatcaggacggtgtaatcaagaattcgggaatcagacgctatcaaactcgtctcaatttggatagaaagatgaggcataacataaatatcggtgcgaatttccagttctcctatactcagagagagcccaacttggtaagtttaggcggatttgattatcaaagttcagcattagcaacacctccgactatgaatatttataatgaagatggttcctatgcttccgatagcccatcgagagtcgtaagtaatgatatcgataatgttgtagctcaattgaacgaacgtaaaaaacaggaaaaggcagccagtatatatgccggaatatttgccgagtgggaggctatcaaagatttgaaatttaagacattcctcggattaaatgcaggtactaataagacgagtgaatataagtctagtatgttgccgaccatgaggcaaaataaaatcaaaggcgaagcttggataaaccaaggggagagctattctattctttgggaaaatacggtgaattatatgaaagaggttgcgaaagggcatcatataactgcattgttaggttataccttgcagacttccagaagcgaagggctcagcttgtatggcaagaattttaccaacgatttattgacttggaacaatttggctgattcggaaacttcgactcggttagttggtagttcggcttcggagtgggcgattatatcttatttgggtagaatcaattattcggcgcttgatcgttatttgcttaccgttacaggccggtacgatggctcatctcggttgggccgggacaaccgtttcgcttttttcccgtctgtggccgtggcatggaggctgtcagaggaaccgtttatgaaacagttctccaatttggataatttgaagattagagctagttatggcctttcgggaaatcaagatattgctctttatcaaacttggcctttgatgaaacaacaaaatgtgatattgactggtaccccacaaataggatatattcccgatcgaatgggaaatgatgagcttaaatgggagacaacttctcaattcgacttcggggtagaagcctctttctttaagtcgaggttaaatatagaattcgatgcttatatcaaaaatacaaaggaccttttattagatgtggagtttccttatacatcggggtttaagaatggatttatgaatgtcggcaagatctctaaccggggagtcgagttgatgattcgtagtacgaatatctcaacgaacgattttacatggtcgactgaattcaatatttcccataataggaatgaagtagtggcgttggggccggataaagactttgaatatacgttccgtccgggtttgggaaatcatccttatacttggttgaaagtgggtgagcctgtgggtgcgttttatgggtatatcatggatggtatttacagaacgagagaggaaatagaggcaggttgcgaacctaatgcttctctcggacaaaaaatctatcgggatattaatcatgatggtgttattaccatagaggatcaaacgacgataggtgatccgaaccccgatttttttggtggattgagtaatacatttaggtataaaaactttaccttgaatatattccttcaaggtacgttcgggaatgatattttgtcgggtggcgatttcctgtatgccacggtcgatccccgtttcgtgaaccaatataaacgagtgaaagacttctggtcgttggataatccaggcgcgaaattccctaagctctactccaatgatgagtatcaaccgtcgacttatatggttcatgacggatctcacttgaaaataaagagtgtaagtctatattacaatttcccggtgaaaaaatggagacggaacaaagtgatttcggagttgcaatgttatgtgacgggaaccaacctttttacgtttacatcttataaaggatatgatccggaggtaaatactggcgcagagggtggatataatgtgtattctgccaatgtgcttagaggtatggactttacggcctatccaccggcgagaacatttacttttggtgtaaaattgacgttataaaaaagaaaccatgagaaaattaagaatgatcatattgggaatattggcggtttgtatgggttcatgtaccgatctgttggataaagagcctatttcccagctcagtgtaaataacctttttaatacggaggaaggcgcagatgcggcagtcgtgggttgttacagtttcctgtataaaccgggctattattggcaagagcggtgggtgtttgcgtttgaaggaaccgatatatcagggaacggtggtggttcggccaattatcaatggactgccggtgaaaaccgttggagcgattggtggctcacgacctatcaggcgatttgtgcttgcaatgtgacaattaccagacttggaatgtcggctatcgatagcgacgtaaaagaaaaattgttggccgaggctcgttttttaagggcgttttattattatcatgctcttacttattgggggggagtccctctgttgaaagatgagatatcgtcgctcgatgaagttaaatatgtaaaaagaagttctcgtaaagaattggccgatttcattatcgaagaggccggtgatgccgctaagattcttgataaagatcctgctgtcgctacccgggcaagtaaaggggctgcattgatgttgaaagcgaaggtacaaatgtggcaagaagaatgggaaaatgcagtaaaaacttgtgaggaaattaagaatttgaaaaaatatgatttgtttgataattatagcgaggttttttccgagcaatatgaaaatcagaaagagcatattttctctgttcaatttgatcccggttataccgaattttctgctcatatgttatggtatttaggtccaagtaaagacgagtgggataaattcaatggtcttggtggtagttcggctccagagtcgttttatgaaaaatatgacgaatgggattatcggttagagcagaacttagcaaagacatggcgtaatcagccgtttaaggatagccgaatcgctattctcaaatattgggatcgtaccggatcgcaaatgttggatcatgatggtctaaacttccctgtataccgatatgccgatgtattactgatgtatgcggaggcattgaatgagtggaaaaaaggtcctacaaccgaggcttatgaggctgtgaatgaaatccgtcgtcgggcaggagtagatgagatagagaactatgattaccaaaaatttaaattgttcattcaagacgagagagcccgggaattgtgttatgaagggcatcgccgattcgacttggtacggtggggcatccttgtagaaacggttaagaaaattagtaaagagataaattccagaggtgacgaatatgtcgatgaacggcataatctttgtcctattcccgagaccgaaattattaaaaacggaaatttagaacaaaatcccggatatgaaaccgctaataaataagttgagccatgaaatctataattaaaataattttaatttttttatctgtaattgcttttgtcgcctgtgagaaagacgacgaggatttttctcccaaagacagttatttgtatgtatggaatgtgcgtacatgggaagtggatacggaaagtaaattgtccgatataaaagtcacttacttttttaagggtgatacggctcgggtaaaacagataaatttttgggttataaaggagaatagtactttgtatgccgaagaggctatgcaacatcaggatagggctttccaattgaccgaaattcagaacgatccggatcaaaaagagtataaaaatcaatgttcgttccgtttcccagaaacgataacaacggactatgatggagatccttttataccgggtgaaggatatcgtttggtcgtgaaggcattgggtaaggacgatatgattgtcgacagtcctacgatagagtcgggggtgtttacgatatatgatccaaacgctcctgaagaagaggaataataaccttatttaaataataccattatgaataaaaaattaattgtaagttttttgtcttttgtttcttgcttttgtctgtttgcacagacagaaggaaacaaggcttttcaactgaatgtgaacaatggagatgcttatctcgattgcggtgatgtgagtgaattgaataatacatctcaatatacgatcgagatgtgggtaaatgtgacattgaatgatttgcccgaccgttttatcatctttaagaaagaaccgaccgaaacgaatcgtatcaaagtacaggtggagaagaatggccagatatatgtcatgcagtccaatggaggtgacggagcatttgcccagacaccggtcggcacgtatcccgagagtggttggcatcatatcgcattggtttacgatggggaaaaagggaccagcggaaacggagccatgatattgtatatagatggcgtgaagcaacccttatcggatgcgacatttaagggcactaccggcaatatggagggttcttttgcagtgggtggcccggcattgaatgtccagtatgatgaggtgagaatatggaataaagcgatggaagctgtaactattatggaatggaaaggttgcaaggttctcgattctcacccggacaaagaggctttggcggcatattatgatttccagaatgtttcgggaactgaggttcccgatttagccggtcaatatcctgctgtgtttgaggaatcggaagcttctattttggataccgaacttgctattttagagaagcaaccagagcctattgcgattaataacggattcaaattgaatgtgaacaatggagatgcttatctcgattgtggagatgtgaaagaattgaataatacgtcgcaatatacgatcgagacgtgggtaaatgtgacattgagcgatctgcccgaccgttttatcatctttaagaaagagccgaccgaaacgaatcgtatcaaagtgcaggtggagaagaatggccagatatatgtcatgcaatccaatggaggcgatggagcatttgctcaggctccggccggcacgtatcccgagagtggttggcatcacatcgcattggtttacgatgggggaaaggggaccagcggaaacggggccatgatattgtatatagatggcgtggaacaatccatatcggatgcgacattcaagggcactaccggcaatatggagggctcttttgcagtgggtggtccggcattgaatgtccagtatgatgaggtgagaatatggaataaggcattggctgcaaaagttataagcgagtggaaaaattataagattggagattcgcatcccgataaaaataatttagtcgcttattatgattttgagaatatatctggtacacaggttcccgatttggtaggcaattatccggctatgtttgaatctaatgaggcagagatattgttgaatgacttggctttgtatgagaaggacgatattcccactgaaatagaaaactcaattgtagccgagcccgaaactttacagactgttgtgtccggtggggagattacattgatagcctctgtccctcaaaacgtgtatatctataatttggcaggtcggttggttttggatttgcgaataagtgcaggcgaaactgttgtacgagatttgcccaaaggtttttatgttgtgaatagacaaaaagtaattcttcgataaaaaagaaaggtatggtgataaaaaggcagtttaacagcctgttttttattcttatacttgaatgtgattttgttaattattaaaaatatacttatgaaaaaaatttattttttgtgttttttatgcttgtttagcgtaatgacaacaatggctcaattatccgggaataaaggatttaagctgaatataaacagctatgatgcttatctggattgtggggatattgccactttgaacaataccggagcgtataccgtagaaatgtgggtaaatatcaatttggatgaactggaagaccgatttatcatctttaaaaaggaacaatcggacgaacgaaacagaatcaaagtgcaagtggagaaaaacggtcagatagtccttatgcaagccagtggagatggggcttatgcacagacatcggcaggggcatatcctcggagtggttggcatcatgtagctttggtattcgacggaacaaaaacgagtatggacgaaggagttcttattctgtatatagatggaataaagcagagttttgccaattcgttttttaaacaacaaacagcgactatagatgccaattttgtgttgggtagtccgtctgtggcttgttatgatgaagtaagaatatggagtaagtctcttagtgcggaaaccatttcaaaatggaaaaactataaagtccttgatactcaccctgataaagatgctctggctgtatattatgatttccaaaatgtcactggtacaacagttcccgatttgaaagggacgtatccggcaacctttaaatcttctgagtctgagatccaggatatcgatttgaagatattcgaagaagtcggagagttgacggtcgaaagtgcgatggtttctcaaaatacgggatatgcgtatgtcaaagaagagaatatacagttgttgactttaaaagtcaatgcagtgggtgctggcgaacgttatttgacaggattggatttttcgtttgatgggacaaccaaaatttctgatattgtcagtgtaaatgtttattttgcaggagaagatcatctaattacagaagattcatatacattgaattatcaggcgttgagacccgggagtaccggtaaggtagagttacgagcagatgtgaatgccgagaagcaactgttaagtgtgggaaataacttctttattgttgcagtgagattgagaccaacagccggtgaaatgaataaattggacggccaaattacaaaactgtatttcgataatggatcagagcttgtaccgcaagatccttcaccagtgggagatatgactattcgtcaaatatatacgctagatcaagaagcttatgagaaaaaatgcgaggcttataataataagatcgtgttcggttggttcccctggtttagtgtaaattcgatcgataaggtcgattggaaaggtttgacacatgtttcgcctatcggatttcaaatagaccaagggaattatgttcctacatttgaggataagagtatcgatttgaaatggccgtggatcgattttatcaatgcggcgcatcaaaatggagttaaggttgtcgcttccattacagggaatgtgcgtgatggcggtaatacacagttctatatcgatttgttctccgatcctcaaaaaatgagagctgccgcagtggctattgccgagtttgtggaaaaatataatttagatggtattaacatggatatcgaggaattctataatacgatatcgaatattggtcagaaatataatgagcttatcgggtatatcgatgaagaactggaaaaaatcaatcccgattttgaattatcggtcgctacctatccgggtaatgaggaaggtacatgggatttcaagggaatgttgaaaaagtccgattatttgactatcatgatgtataatatcggatcgacttttacttgcccgttgcctgatgcaaaaagacgtattaaacaattttggctcgatatcgatattccggccgcagatatagttattgcttggccttattatggaaatctttttgaaggaggtcgtaatgtaggaactgcggtgcttggtgatgttcctaagtattcgaaagacggtaatattacttgggatgaatcggctcaatgcaatgtatatagatatacgggtgagaatggtacggaagtaacggcttatgtagaggatttagagagccttgcgttgaaatatgagtatacgaaaacgggaggattcaaaggtattggtatttgggccttaggccaagatgccggtatggaggaaggtgcttatgatttgatacgtaaaaatttcgatacgacatacgatggtagcggtatcgagggaaataatagagcatcggacaatatctctattttcccggttcctgtacaggatcaactgaatgttcgcacagcttccgattcttcttttgcaacggtaaatatttatagtgcgactggacaattggtcgttagccaaacgatttttgcttcgagtggtgcggtagatgtggcaactcttattccggggtattatattgtacaagtacaaaccgaaaccgagtcggctactttccgaatggtaaagaaataaaattatagagtgttaaaaatctcgaaaggatactttgatatatcctttcgagatttttttaacatttgttttttatgacaaataatcatatgtaaaataatccacttatatgaaaagaatattgtctattatattgtttgcagccggagtgttcggtgtgggacaggccaaagagcaattgtcacccgaccagacattgtggtttacgtcaccggctgaaaattgggctcaacaggctttacatatcggtaatgggtatatgggagcatcgttctatgggagtgtgaatagagaacgttttgacattgcagaaaaaacattttggaccggaggtcctcattctttgtctgattttaaatccccgataataaaaggcggaaaagataaaatagacgagatccgaaagttgatcgttgagaaaaaatatgttgaggcagattctctttgtcgtaaatatatggtggggaattacagccattacggatatttctcgatggttggaaatctttatattgatttccctgagtcggaacaccccgtaaaagattatgtaagaggtatagacctttcgacctctcgtggatttgtggaatatgtgcaagaggatacatattttaaacgggaatatttttgcagttatcccgataaacttatggttctccattttacttcggataaaaaaaataagataaactttaatttgtcacaaatattgacttatccggcaagtcaagtaaaaaaagaaacagatggcttggtctttaatggagtaataaaaggtaacggccttaaatattgtattcgtattaaagtattacaagaagggggaacagtaagtatagtgaatcaaaatatttgtattgagggagctgaccaagcgacggtcttgtatgctgtggacacagaatataagcaggaatatcctttatataaaggcgaaaatccacagaataatacagctaagataattaaaaatgcaggaattaagggttatgaaaaaataaagaatgaccatatagccgattatcaggctttgtataaccgggtgaaattgattcttaaaggagacgaattatcggaaaaattacctacggacactcgtgtacggcaattacagaatggctttaccgatgattcctcgttgaaaactctatggtttaatttgagccgctatttgattattagcgcatcgagacccggcacattgccatcgaccttacaaggagtatggaacacttttgagaaagctccttggaatggaaattttcaaagtaatattaatttgcaggagatgtattggtcttgtggccctactcgtttaactgaatgtgaaaatgcatatattagttgggttaaagatcttgttgagtcggggcgtaaaaccgcagaggaatattatggaactcggggctgggtgagtcattcgacaggaaatatttgggggcatacagtcccgggagacgatattctttggggattatatcccagcggagctgcgtggcattgccgtcatttgtgggaacattatgtatttacccaagatatcgattatttaaaaaatgaggcttatccgattatgaaggaagccgctttgttttggcttgaaaatcttactccttacgaaggttatttaatagcagcacctactgtgtcagcagaacatggtattgagatgaggaatggtagtccggttgaattttccacagtgaatggggaagaatgtgcgaaaaagatatttacagttccggcatatcaggatattgtgatgatatatgatttgttttctaacgttgtagatgcagcaaatgcacttcatgtagataaggagtttagtaaaaatattactattgcaaaagataaactttatcctcttaaaaagggaaaatacggtcaactgcaagaatgggttgccgatgtcgataatcctcgggatcatcatcgccatattgcccatttgtatggaatgtacccgggaaatatgatttcatatacttatacgccggagtgggctaatgcagtgaaaaagtctcttgaaatgagaggctttggagaatttggagatcgttggcctcataccggaggaaactggtctgctgcttggagaatcgcgttatgggctcgattgcatgaggggaatacagctatgtatattttcaaccggttgataaaagaaaatggatatgaaaatatgatgtcgaaccagtctggtaatatgcaagtggatgcgacgatggccactgccggattatttgccgaaatgcttttacaatctcacgacggatttatcgatttattaccggcattaccgacagaatggccggaaggaaagattacggggctggcggctcggggaggatatataattgatatagaatggaaaaatgggagtcttgtgaaagcggagatcaagatgtcgaaaggctcgatttttccggtcgttaaggtgaatggaacatcaatatctgatgacgattcccgtataatcgtaaagcagttgtagaagtagggtttatagtaggaaaaagacctcccatagttaaatatgatgggaggtctttttattttaaaagaaaagggttataattgtttggtacaaattttattcttggtattacaggattatgaaatttgtggagtcatttggtttttgttattactgaataatcgtttgtttgttgtatctctacaatagagattaatagatatagaatattatcatttttatgctcctctaatcggtatttggtaaaataccaaaattctcggcaaatatagtgaatagagcagaccaattgtcactctatctttgccatatcgataataacatgaaaaataatggagaatatggaaattgtatttccccgattattctttacggggaaccgattattgggagagagagtcgagaatgtgagccgtactctgggagatttgcgtggtatttttgccgatgtcgatgctttttctcgtatgccgcagaatatgccggcttatgaggtgagtagttttttgccggaacaggagggtactcccggcggattatatttcgggattacttatttgcatccgggaaaagtgggaaacgagtacttcatgactaagggacatttccatgcgaatatcgatcgggcggaattttattgggggcttgaaggagagggcatgttgattttgatggaccagttgcgtcgagtgtgggccgaacgggtttttcccgggagcctacattatataccgggtggtgtggctcaccgtatggcaaatacgggaaatactttattttcttttgcagcttgttggccgtctgatgcagggcataattatcgggaaattgccgatcatggctttgcagccagattgttggaggtcgatgggaagcctcaattgataggagtataaagttatggggggaaattatagcgtcgcaatagatttgggaggaactatcataaagataggtttgatattggattctgagattgttcggtttaccacaatctcttcggattcggtgaggggtttatctcacatgcttcccaagatggagcatgcaattgattcattgttgtctgaggaaggaatatcttcgacggatttggtatctatcggattggcgtttccgggtatggtgaatcctgtcgaatgcagagtgatttctaccaacgacaagtatgacgatgcttgtgatatcgatctctgtcattgggccgatagtcgttggggcgttcctttcgtattggaaaacgatgcccgtcttgctgtcatcggagagtggctctacggtgcagcgaaaggtacgggaaatgtggtaatgatgactatcggtacaggaataggaaccggtgttatattagatagcaaaccgttggtggggcatcatcatcaagctggttccttaggagggcatatggttgtcgattatcgtggaagacgttgcagctgtggaaatataggttgtgtagaggctatggcttcttcatttttcttgccggatattattcggtctaacgaacgtgtatcgccagattttaagattgcggcatccgatatggattttaaacaactgttcggtttaatgagacaaggcgatgagaatgctattattatttgcgaagagtgtatgaatgtatgggcagctgccattgtctcttacattcatgcttatgaccctgaggtagttgttctgggcggcggaatcatgagaagtgcggatattattttgccttatatcaataagtgggtcgaggatcgagcttggactcctatcgaccgggtgcatattgtgctttccgaattaggagacaatgccgctttattgggattgaattattatttgacaagtgtaaagaggagaagaaatgaaaaagtattcaaattataaatctaattatgataagtatccggttgtacaggtatcggaaacatctgaaaatgtttgttggcaaggttggccggaaattgtatcgcagttgaacaagtcgttggaaaacgttcataaaccggtgaaggtattggttgtcgaatgttatcaaggtgtttatgacgaggaggtaaaatcggtgttgaagggacaacttccccatacattatggttggacgcttcttcggccatgaaaacttcggaagagatcaattcgtttttgaagtccgatataaccgatgatgagattttcggttatatgactcgctatcatatggattgttatttcgatgaaaagaagattgccgagttgcgtgaaaaggttgccggtatatctgccggtgttgtaatcgtatatggcgtaggggctgcttacgtgatgcccgaaagcgatgtattggtatatgccgatatggctcgttgggaaatacagatgcgttttcggagaaacgaaatttcgaatgtcggtgtggataatcgcatggaacgggcttcgttgcaatataaaagaggctttttcgtagattggcgcatttgcgaccgttttaagaaaacgttgatgaacaaatgggattatgtcttggatacgaatgtgatgggcgatcctaagatggcgacagcggcaatcgtggatgctggtttgaaaaaggcttcgaaatctccttttcgagtagttccgtttttcgatccgggtccgtggggcggtcaatggatgaaggaaatatgcgatttggatcgtgaaactcccaattttgcatggtgtttcgattgtgtccctgaggagaatagtttgtatttgggcttcggagaagtccgtttcgaaataccgtctatcgatttggtattttcttatccgcgtgagttgttgggtaacccggtttacggacgtttcggggacgagttccctattcggttcgacttcttggatacgatggacggcggtaatttgagcttacaggtgcatccgctgacacaatatatacaagaaaagttcggtatgcattatacccaagacgagagctattacattctcgatgccgaagaagatgcttcggtttatttgggagtgaaggacggtatcgtaccggaggagatgataaatgccttgaccgaagcacaacatacagggcatttcgatgcagaaaagtatgtcgggaattatccagtgaaaaagcacgaccatgtacttatacctgcgggtactgtccattgttcggggcgcaacagtatggttcttgaaatcagtgctactccttatattttcaccttcaagttgtgggattgggggcgtttgggattggacggccgtccccgacctatcaatatcgggcatggtaaacatgtgatccaatggaatcgtacggagccgtgggttcgccgtgaaatttataataagatagataaagtggccgaaggagacggttggattgaagaacataccggtttgcatgaatgtgagtttatagaaactcgtcggcattggtttaccaagccagttcttcacaaaacagatggaagtgtgaatgtgctgaatcttgtcgagggacgtgaagctatcgttgaaagtcccaccggcgaatttgatccgtttgtcgtacattatgccgagacatttattataccggaatcggtgaaacagtatacgatacggccttatggagagtcggaaggaaaacagtgcgctacaataaaagcttttgttaaacataatgtatgaaaagatatggaattcaatcccggttttgatataattcctactgtaaatcctatgggatttaaatatggtgcagatgtgttcggtccccaagtggagaatcgttatttgcgagatattcggggaagtttatccgaccctcagtgcgatggccctgaaatcgtttattccatagctatggacgtggggaaatgtaaacacagagaaatgctcgaacggatgcatttgctttatggggtcgtgacctatgctgccggtcgattgggtaaagagcctattcgcagtcaaggtcatatccattgggtttctaaatatagcggttggtctactcctgaggtttacgaaatatggacaggagaggctatcatttacatgcaggaatatgccgaagataatcccggtcgttgttttgccgtgtatgctaaggccggcgatgtggttatcgttcctccatattgggctcatgcgactattagtgctaatcctgataaacctcttactttcggagcgtggtgcgatagggagtatggtttcgaatatgatggcgtacgtcgtcataagggaattgcttggtttccggtttttaacgatgaaggaaaaatagaatggcaggcgaatccttgttatcaaccatcggaacttatttgtaaatctccggccgaataccctgaactgggcattgtgaaaggagagtctatttaccgaactttcgagaagtcgccagatacgtttttatatgttccgaaccccggattgaaagaagaggtttggaagaattatgaaccttgattttagaataaattaaaattggatatgatgaaaaatacaattatttatgtaatagctgttatcgctgcgaccggaggcctgttgttcggattcgataccggtgttatatcgggggctataccttttttccaaaaagatttcggtttggataattccatggtggaattagttacttcggcgggattggtgggtgctattcttggcgctttgttttgtggaaagataaccgatatattgggacgtaaggtagttatcttagcttcggcggttatttttacgatcggtgctctttggtcgggatttgctcccagtatcgagcagttgattatagcccgtttatttttgggaatagcgatcggggtatcgtcttttgcagtacctctttatatagccgagatttcaccggctaataaacggggcagtttggtctcgatgtttcaattaatgatcacgataggagtgttggcatcctatttatcggatttgatgtttgccgatgaaggcgatatgtcgtgctggcgtcctatgttttatatcggagtcgttccggctttaattctgttgataggtatggcatttatgccagagagtccacgctggttgataagcagggggcgagatgaagagggaaaatcggtgttggctcgtatcgaagggaatgaggcaatggaagattcgtacaagaccatcaagaatgagctgataaaaagtgaaaaagataagtcgggtattaaagaattgatgaaaccgtggctgcgtaatgccgtaattatcggtgtggggattatgttctttcaacaattcgtaggtatcaatacggttatctattatagtcccaagatattcttgatggccggtttcgatggggcggtttcggctatttgggcggcggtcggtgttggagtcgtcaatctgttgttcactattgtttcggtctattttgtcgatcgcttgggacgaagaaaactatattttacaggtttgacaggtatttttgtctctcttcttttactcggtatctgttttactcatttttcttatctcggagagatgggtaaatggttgtctattattctcgtgttcgtctacgtcgctttttatgcgatcagtatcggcccgctcggttggctcattatttcagaagtatttcctcagaaagtaagaggcctcggttcttctttgggctcgttatcggtttgggtgttcaatacagtggtaacgtttacattcttcaaaatagtgaaggcgttcactgtagaaggtactgaaatttatttggacggagaaaacttggggaatccggcaggtgctttttggttttatgcgatagtagctcttgccgcaatcatatggggatatttctatgttcccgaaaccaaaggcgtgacattggagaagatagaggagtattggagaaaaggaggaaagccccgtcatttgagataaaaaataatggtaaatatccaaaaaatagattggttttatttattatggtaagataccataattcttggctaatatgttggaaaggcagtattaccagatcatctaatttagcatcacgtaaggatatttcttaacccaataccattttttgcaaaatgaaaaaataacatggagaaaaacacgttgctatgacaaggaaaaaacaaagtaaaagaggtttgagagtatgttgcctcatggggtgtatggtactcttgttttcccaaccgtttgggatttctgcacagcagacagagcagggcggtcccggtaaagtttcggccgctgattcgcaacagtttatttcgggaaaggttatagatgcttcgggcgtacctattataggtgcgacagtccatttgaaagatagtaaaaatgtggctgtgaccgacatggacggtaatttctcgataaaatcggatcaaaaaaatccaatacttagagtttcttatatcggttatgatgccgtggaaacgagtgttaaagggaataaatctgtacgtatcgttttgaaagaaaataccaaagcactcgatgaggttgtcgttgtaggttatggaacgatgagacgttcagatgttacgggttctatatcttctgtaaaaggaagcgaactcgtaaagaattcgacttctaatgtggtacaatctttggccggaaaaatgtcgggtgtacaggtggttcaaaattccggagctcccggtggagatgtttctattttgattcgcggtgtcggtacgattaacgatgcgtctcctttgtatgttatcgatggagttcccgtaaatggcggtatgtggtatataaatccggcagatgtagagtctatcgatgttcttaaagatgcttccgccactgctatttatggttcgcgaggtgcaaacggtgtagttatggttactactcgtcaagccaaagagggaagaacagaaattaatttagattatagtttcggtattcaacaatctgcaaagacgttcgatatgctgaatgcatcacaatatgctgctttacataatgaaatgaggtcgaatgcgggtttatcgttgaatccgttgtttgccgaccctgaatctctcggtgctggtacggattggctttctccgttattccgtacggctccgatgcataaagtgaatctttctattttgggcggtaattccaagattaatcatgcgacatcggtgggttattatgcacaagacggtattatgaaaaattcggaatttaaccgactgaatcttcaatccaatatatcgtcacaaatattgagcaatgtaaaggtaagagcaaacgtaaacctaagcgccgagaatcgtcgtactcagcctatatcgactgttattcagaatgctatgcgcatgttaccttccatttctatttatgacgacgaaggtaattataacggtcctaccgggaatgccgagttgaatggagatgctttgaaccctgtggctatcgtaaacgaacaaaagtatcgtatgaaaggattcagaatgttatctaatatttcggccgagtgggagatcatcgacggtttggttgctaaaactaccggaggtgcggaactgggatatgagtataataacaattatatacctaaatacaaatggggtaataaagagcagaccaatacctcgcaatcattgtcttcggcttatgaagagttgtatttgtgggataattcacttacttatgacaaggtattcggcaaacataaattgaatgccatgataggaacttcttaccaagagtataagaaggaatggatgtctgctgccggtacgggacgtgccagcgagatgacgacggaattggataatgcgacgaaagctactgatgtgggcggtaattcttattcttgggcgttgatgtcgtatatgggacgtgttcattattcgtatgacaaccgatatttcttgacggcaactttccgagccgatggttcttccaagttcggagccgataatcgattcgggtatttcccttcgttttcaacagcatggaatgtgtctaatgaaagcttcatgcaagatgtcccctggatatcgatgttgaaattgcgcttagggtatggattgaccggtaaccagaatatcgatgcgtatgcatttgccgataagttggaagtgaacggcgtttataatttcggttcgcaacgaggatttgagtcggaacaagtatcgcttatatacccgtacaaactatccaatccgtctattaagtgggagtctgtcgaacaatacaatgtcgggttggatataggtttcttgaatgaccgaattatcgctaatgtcgatttctatttaaagaatactaacgatatgcttaccaagaagcctgttcctcaaactagtggaacatctttggaacaagccgattggcctcctgtgaatatcggtaaggtgaggaataagggtatcgagtttaatttgaatactcgcaattttgtcggagaatttacttgggaaaccaacttaaatatgactttcaataagaatgaggttttgaaattgggcggtcccgaaatcctcagcggtgtaagtttgattcgggaaggtctgcctatcaactctttctatggttataagatgggtggtatctatcagacactggacgaagtctttgcgggggttcctatggaaaaccgcgctcctgataaagcatcgcataattctcaggtcaatacgtcaccgggcgatatttggtttgtcaatgtgaatggcgatgatgtaatcaatgattttgaccgaacagttatcggtaatcctcaacctgattttatttttgggtttaacaatcaattcggatataagaattttgatttgagtatatttttccagggttcgtacgggaatgatatatggaacggcgtaagagtgtctcatgagggtatggagagtacttataaccaatttacctctacattgaatcgatggaatggggaaggatccagcaatacgatgcctcgtgctatttatgccgatccgaaccgaaataacagagcttcgactcgttgggtagaagacggttcttatctgaggttgaaaaatcttactttcggttatcgttttactcaggattggttgaaaaagatcggggccaaatcattacggttgtatttgagtttcgataatttgtggaccttgaccaattattcgggtcttgaccctgaggtgggtctttggggattggactatggaatttatcctacttcccgagtctatatgtttggagcatctgtaaaattctaaatctttcgaatcatgaaaaggacaattatatctactatatctgttgtcgttctttcgactgtcttgtcgggctgtatggataaactcgaaatattgccgaacgaccaaatcattaccgaaaactttttcgaggagggttctcccgaagagatagagagtggtgtcaattctatgtatcagcggttacagagttcgtatatgtataatttgcgaatgtggacattggatattgtcgccggagagggccgtgttggaaatgaagccggtggaaacggtctcgaaacgacgcagttgtctaacttcacagcgaccagcgataactccggggctaaggaattatggcgcggaccctgggcgggaatcagtcgaacgaattggattttgacgaatatcgataaatctccgaagatttctgacgcaaagaaaactcaatacaagggagaggctcattttttaagagggttgtattatttcaatctggtacggttgttcggcgatgtgccctggatagacaagcaacagactgcaagcgatgatttgcaggtgtcgagaacatcgaaagatatagtttaccagcacatcattgatgatttttctgatgcggcatcgatgttaccggctgtttatgaaaatacgaccgacataggacgtgcgacgaaaggggctgcattcgggttactcgcaaaagtttatttgacattgaaacggtacaacgaaactttggttgctatcgattcggtgatgaatcttggagtttattctcttaatcggaaatatgaatggaatttcagcgatttgcgcgaaaacggtccagagagtttatttgaggttcagtatgaaaaagatgtgacagcatacagtgaatttgatatattgggacaaggagggtggcatcacgaatatatggctcctttggcaagtatcaatattggaggaccgtggggaaatttcggttggtttgctgtttatcccgaatttgtagagagctatgaacccggcgatttgcgtaagtcggtttctgtttggtgtgaaggagatgtctatcagggctggtcttacgatcctacttgttcgcagacgggtcataacgtgaaaaagttcttgtgtgaaaatataggtgtcgaccgggcgatggatagcccacttaattttccggtattgcgatttgccgatgttttgttgatgcaagcagaagcgttgaatgagttgggtcgttcgtccgaggcggctgctccggcatcttctgagaatgatggcggtccgttgaatcgagtacgcgtgagagctggtttgcctaatgtgaccactaccgaccaagtagaattgagagaaattatcaggcatgaacgtcgtatggaattagcgttcgagggtggacaccgatggttcgatttagttcgatacgataacgatggcgaatatgcaaagacatttttccaaagtataggtaaaactaattttaccacacctaagcatttgctgttgccagtacctatcgacgatatagatgccaatcctaatttgttgcctaataatccggggtactaaaatcgggattagttttcccatagagagaaaaagtattgagcgaaaagcttgtttgatgtaaaaaatgtaaatcatgaaaatacgaattctaacattattgttttctgcttttatcataggagcgagttatgctcatgacgatcttgtgtatagaaccgcttcggagtggagcttcgatgctggaaatcagtcgactatttcggaaacgtacggttcggtattcttgggcggggcggtggttgccgattataatggcgacggaattcccgacatttgtgagatagatacttcgggcgaagagatacgttggatatggaaactgggtaacggcaacaatgaatggagcgagattgaggctataacgtttggagaaacagctaccgataaatgtgcggtaggtgattttaacggtgacgggaaagccgatattgccgtgatgagatcaggctcttctttggctacgtggtatatagattatgctccatgtgacggacagttcgatgaaaaggggcgattcggtttatcgggcgatattccgttgtcgggcgatttcaatgccgatggagtagatgatatttgcgtatatcgcccctcttccggtacttggtatgtttgttttgccgatatctcagggtatccagagttcgagagccatttggctattaatggagttttgttcggaacgtcaggcgatattccttttgtgggcgattttgatggcgatgggtatgacgatatggctttgttacgagcatcggagaaccgcgtgttggttaatctatatgatcgaaagaaacctaaatatgagcattatgccgatctaaacggtgtcggagtttctgatttggagattactgttccagtacagaatgtagtggctgtttcggcggcagacattgatttgtcccgtcctaaatcattgcctttggctacgcaggaagaggtgggatcagaggtaaatctgcgacatggctggacttgtattttcgataattctcttgatgtggataaatgggctgctgcgttgcaatatgcgggtatcaatacattggaatatcacccgtggatgagagctcatgaggaggttgcaccggagaccgaaacatggaatacgtatgtcggtgatgaccgtttgtggaccagcaaggctatgatgaaacagaaggtagagaagtttcgatcgataggagggcgttcaatttgttatacaggtatttatgccagtacaccagcatttgctcttgcacaccccagttgggccatgaaaaatgaggctgataaaagtttcatgacatacgggggatcttatctgtatttaatgtctactaacgagaatgtgaacgctccttatgaggtgaacggaaagaattataagagctttaatgaatatttcatagcgcaggctgttgctgctcaacaggaatataattatgacggttatcgttgggactggtatggtttgcctgaaacgtatgtttgtgacggattggccggtacgggaaatttttcttatgaaatggcacaatttgtcaaccaattggatattgctgttaaggaagtaaggagcgatgttactactacggcattgcaacttccttcgactagtggaaatgtgccccatttgacgacgggagcagtggtcaatcatcagtttatggaactttggccgtatggtacgggaacaaaatatagtgacctgtatcgtgatatttatgatgctaaatcgcgttatcccgataaacctgtgttcgctaatttttatcctccgacggaaatgaatttatcgaccagttggccggttgaaaacatagattatcaatttgctacctgtctttcggcaggaggatacccgtctgcgcaggtggtcgacggtgttgccggatttaccgatcctgtaccgtttcatgccgtaaattatccggcaagcgtactcgaacgtatcgcccagtggaataaatttgtcgctgcttatggtgcttatttctattattcgaatccggcttatcttattaccgattatgtccggggagactttacggtttcggggagtaatagtggagtgttcgggacgttgaaaaagcgttatgataaaaggacacgtgagatagatgcttttgtcgtggatcttgtgaactatggtaacagcctagatttacgttgggacgaagttaatacagttccttcttctacacaggtttcggtttcatttactttgcccgatggttttgtcgcagataaactgtattgcattactatcgacggaagaaacgaagttccctattccttgaacggcaataaagtggaggtttctcttccatcggtgtcggtatttgcttcgttggtactgacttcgacaaaatcgcaagagctcccttcggaaccgagcggggtaggaagtatgccagaattgtttacattcggttatgatgcgaaaggtgagactttaaataaagatgaggctacctatatccctgttatgcaagaggggaaaccttatgtagtagccagcgagttcggcgggaatgtggctgagtggtatgaaatcacagatgcttatcagggagaatccgctattcgcgtgactgccggtgatattcggttcaatacgacggacaacggagcaattcggattcctatcgaaaaattcaaccggttcaaacttgctgttcgttcgaataatacgactacctcatggttcggattccggctattgaaaccgtctgaaacatcgtctgtgtgggaatcgagggacttgtattatcgcataggttatagtcagcctaatatcgcttatatcacattgactcctgtgaaaccgcagaacggagtatgggtagaatatgagcgggatattttgagcgatgtgattggtctgtggggtgcggaatgggcaaatgcgatcgtaaccgatgtgcattacggaccggtagatagaaatagtgcagactatgataacttgatttttatgtcgcccgattataacagtggaatcgataatcaaaaaaaaaacgataaaataaagtgttggactgaaaacggcagaatatgcattgaagtttccgatttttatcgggggaaagagttccgtctacaaattaccgatttgtcggggcgggtaattggtatggaagactgcattgtagatagttatcgattattatccgagacgatactttcgatgccgggtgcatattttatacaggccatagataaagaaactgatgtgacggtgctgcagacccgttgcatcgcaaattaaaataatgtataacaataaaagtgattaccatgagaaaaattgtctttttattaacagctttatgcttatccatgagtgcatggagtcaggacgggttggtatattggtcgcaagccgacggttacaaattcgattttgatttagatggaacggtagatttttcgttaccgacacaaacgactgataaagctatttcgcaagtatttgtgttcgatgcgaatggcgatgggtatttcgacctttgtgagctcgatttaaacgataatctcattaattggattttttattataatgatgggaataataacttcgtagaccctcaaacagtcatatatggcatgtcggaaggagataaaaaattggccggagattttaatggtgacggtatcggcgatgtgggtatccgtcgcgataatgagtttggcctttggtggctgattacgttccaagcgatggctcctgatgtaaaccaacagttcggaattagcgataaagacttattggttgccggagatatgaatggagacgggcaggacgatatagtgtgctatgataagggttcttggttatgctcttttactccgtcagatacggaatataagactcccgattttgtctcaaaagatgtgcaggtgactttcggtacatcgtacgatatacctgtgttgtgcgacgtggacggtgacgggtatgccgatatggggttgtgttctgtcgatgacgaggaagttagttttaatctccatagtgcgacgaaaactgcaaataacggatatagcagcgataatggtcgaggtactttcgataaggttgtacttatgccttcgggtataaatcctacttgtgtatgtgctgtaaagagtaaaggaacgaccggcatcgaatcggagcatgccgtggcaaatgtcagtgtatatcctaccttagtacgggctggggattcttttaccgtgaaaggtaacgatgtgacgaaagtgaaaatatacggtatgatgggacaacttgttaaggaaatcgataccgacggtagcatgtcgacggttgtcgtttcggttgatggttgggctcagggaacatattttgtttgttgcgaaagtgaaggtgccgtttcttcgtctaaattaatcgttcaataagtgaattgagtctgtatgaaaatctatttgaaatatatatttctgtttcttattgccgggagtatcttttcttcgtgtaaccaaaaagatgagaaggtgtattctttttgggcacttcaaaatagggcgacgggagaatatttgtatgaagacgacggcgaatgtaaattcagccgtgaaaagcaaggcgataagtctttgtggaaaatagcggctgctgagggcgatcatgtttgtatcgtaaataagaagagtggtagatatttgtctctcgataatgggcaggtcgtttgttctgtggtcgatcaaccggttaccgaatctgccgaatggtactacgggaatttcgattttgttactcaaactaatagcggctggtacacaatttcgaatcgttcggccgagtcgaatttgcatttggtggaaaaagatggtacactttgcatgcaggataacgcaaacagaaataccgatttttctgcccattggacttgggtgagagaagagggtacgcctttgccttattcttttactcccgatggagttacggatgcttcttttttgggaatacgaacggctaaggctatttctccaaccgagatacactccgattatcacggagagaaagtatggaaattatctcaggatatttcgtcttttccgaaattttccactgaaaacaatttgttgatagaggctctgtacaatatggcattggaagagatgttgatggatgtgcgcagcgacagcacatttagggccggcgctctttggcccgatacatggactcgtgatgccgtgtacagtatatggttcagctatgcatggattatgccggaagtgtctcggaaaactctcgataagcagactcttcgtaatcctcgcgaggccttgcaggacacaggtagcggaggttcatggcctatatcgaccgaccgtgtggtgtgggcactcgctgcttgggagtactatctgtacacaggagatagttcgtggctcgaaggtgcttatgaaggtttgagttatacggctcgaaaggacattcatgtagcattcgataaacgcatagggctgttcaaaggggagacttgttcgatggactggcgtacccatacttatccgaattggtttaccaatgtgacgataggcagttcgttttcttgtggaacaaatgcgctgcacatgttcatgtatgagtttttgtcgaaggcagccggaatacttggtaaaccggaaagtgagaaaacatattgggaaagtttcaggaatgtgttgaaggattcgataaacaaacatttctggaacgaagacaaaggtttatacgagtgttacttgtatcccgaaatttcggggtataaggcttcggaacgggtcggtgtcatgtcgaacggactgtgtgctgttttgggagcgagcaccgatgagcaaattcgccgtatggtcggtaatttcccgctatatccatacggggctgctgttctttatccttctattcccgacgattttgcataccacaataaaagtatttggccggtttggcaaacaccgtatatgtatgcggctcgtcaggtgggcaatatattggcagtggaacacatggcggcttctttaacgagagcttcggctcttttcctgacacataaggagaatatgacttacgacaccggatatgatcggggtacagctttgaactcggataggcaactgtggtcggtttcttcctatatcagtttggtgtatagagttttgttcggcatgaatttgacggaacgaggaatcgcatttaatcctgtcgtacccgatatagtgaacggctggctttctttgtcggatttccgctatcgcgatgtgacgatagatataaaggtatctggaaagggaaatcgggtgaaatcgttgaaagtcaatggcgagaaacaagcattgccttttgtccttccagccgatagtaagggggaatattcgatcgagatagaaatgatgatcgatgaaccgaaaggcaaaataaatttggtgaaggctggacccgggaaatgttggtcgccggtagaacctgttttggtattgaacggttcgactctaagttggaaggaagaggaaaatatgaagtactaccttcattccaatttttctgaggtggataaactggtaacctctccttacgatttaattggggctcccgatggattttattcggtttatgctgtcgatgaaaaaggatttgcatcggatatgtccaatgcggttgtttattctacttggcaatcggtttgtgaagcggagcagagctctcattcaggaacggtttctaatcttcacaaaggattttcggggagtggctttgttatcgatttgtttgcacgtccggctaatgtgaagtttcaggtacaagtccccgaggccggcgattatgccatagcccttcggggtgctaacggacacgggccgcatggtacatggtgcgccatacgttcggtggcagtggacggaaacgacgccggtacattcattttggaagcaacaggcgattggaaacaatggttggattccaattatattgttcttcgagggttgaatgccggagaacatacggtgtcgctttctatcgatcctgagaagaagggatatgactttaatatgtcgcatggacgggaagacgctaatgattgccatatcgactgtttaaagttgattcgactttaataaagtcttattgtttatttaggaaagagaatatcttgctatgcagggtattctctttttgtttttaacggactttttatgatcctgccaaaaaatctatttgtcggcagtttaatcattggaaaaataagaaagaatatttttaaatttaaaaaaataattcctatatttgactaatagattgttcgaaactttatggcgataatataaatttcaatatggaaatgaaaagaatattttcggtcgtcgtctgtgctgtgggagtttttttctccatgacagccgagagcaaagacggatgcttaaaaagttacgtatcggcggacagtttgctcctgtacgaatattacgaaacgtatgttatgattcggcctttgaactatctacggatatttccggagcagaaagctgttgcgccggactggtttcattatcgggacagggtgatagaacttcgtgttcttgcgctgaggaagcggattagggaggagtatccgcaggattatcctttggggagaggatccgtacgtgtgtggctcatgttttctcttcgtacgggtgaattggtaactgctgagttaatgtttctaaaagaggtattagaggttgtcgacagtttccccgcacgggagattattgcgatgtgcatgaactccgattggagtggaagtacatatataatggagcatgagccggataaatatgataatatgtacaccggctatcttttttcaccctattagtgtcatggatttcaaaaaaatattttcggtcgtcgtctgtgctgtgggaatttttttctccatgacagccgagagcaaagacggatgcttgaacagttacgtatcggcggacagtttgctcttgtatgaatattacgaatctcatatttgggttagtccattgaactatcccagggtattctctgagcagagagccgttgcgccggactggtttcattatcgggacagggtgatagagcttcgtgttcttgcgctgaggaagcgaatctgggacgagtatttgcgagatttccctttggagaggctatccgtacgtgtgtggctcatgttttctcttcgtacgggtgagttggaaactgtggagctaatgtttcgaagagatgtattagaggataccgacagtttccccattcgggagattattgcgatgtgcatgaactccgattggagtggaagtacatatataatggagcataaaccggataaatatgataacatgtacaccggatatattttcccgttatattagtgtcatggatttcaaaaagatattttcggtcgtcgtctgtgctgtggggatttttttctccacggcagccgggagcaaagacgagtgcttgaacagttacgtatcggcagacagtttgcttctgtacgaatattccaaaacgcatattatggctcggccattgaactatccccgggtatattcagagcagaaagctgttgcgccggactggtttcattatcgggatagggtgatagagccccgtgtctttgcgctgaggaagcagattagggaggagtatttgcgagattatcctttggagagaggatccgtacgtgtgtggctcgttttttctcttcgtacgggtgagttggaaactgtggaggtaatgtttagaaaggggatattagaagatgtcgacagtttccccgcacgggagattattgcgatgtgcatgaattccgattggagtggaagcacgtatataatggagcatgaaccggataaatatgatagcatgtacacggagtattttttttcgctatattattagcgtgaagaataggagtaagtctcgtaattgcataaaaaattgaaggacgagtgtgaataggttttgtgaaaatgttttatcttcaccaccaaataatgaattatggcatcttattccagaaaatcgacccgtaataaagctctttggggatatctgttgcttattgccgttttgttgtcatcttcgtggtttgtgtatcatgagataaatttgttggtatcgataaaagcggtcgaggcagatatgaggctgaaacgtcaggagatgtcttccgctttatcgtctctgtatagagcggagacggtgggacaatcgctcgtttggggacagttttcggattatccggtatataggagagtgacgaatgatgccgtaacatgtgtggattcgttacgtcgtattacatcggactctgtccagctgtcccgaatcgatagtattatcggtctgctgaatcggaaaaatgcggttatacggcgattgatgggaaccacgatcgatgtggccgaggagcaaaaccggaaaatagaggatatgatgaaacagcaagattcgttgatccttattcagaatcgtcagcaaagattggttcgacagagcgattcgctgatagagaaacgccgccgtaaaaatgtgttcggacgaatagccgatgctatttcggggaaagcacctactcggttagatagcattcggatagaatcgaaacgtataggagcgttgagcgattcgttggctgccgatttgaaagcgatggaaagcggttataacgagatccgggagttgtctcaacaggctctcgaacgggagcggtggcgattgagaaacgataatcaacggttgaacggtcagatcaatcgtctgatgaatagctttgaacgagagcaacttattgtatcggagaagatacaagaacgaaatgaacagattcgtcaggagtctatgagagctttggtcgctgtggcttccggtgctattttattggcggttatttttggggtattggtttggaaaggttggttaagggacgatcgtttccgtagggcattggaagaagctcggagacgagccgaagatttattggaggcccgggaaaagttgatgttgactataacgcacgattttaaggctccgctcggttctattatcggatatgtggaattgatgatgaggctggataataccgaacggcaaaagttctatttgcaaaacatgaaggcatcgtcggatcatttgctttcgctggtaagcgatttgctcgattttcaccgtttggaatctcataaattggatataaatcgtattgctttcagccccaaagtattattcgataaaatagtatctgctatgcaacctgtggcggataagaaacaactgaatctgatattgaaagttgagaaatcggccgatgccaatttttcgggcgatccgttaaggattaagcaaattgtcgataatttgttgtccaatgctttgaagtttacagcccggggtacggtgacgattcatgtgtttgtgcgtgtccgatatcttgttttttcggttagcgatacgggacggggaatagcccgagatgatttggaacatatatttcaggcttttacacggctttcttcggcacagggagtcgaggggtttggattggggttggctattactcgacagctcgtcgatttgatgggcgggcgtatagatgtccgcagtgtggagggtgttggcagtacgtttaccgtggaaattccattggaagaagtctcggagaagaccggtgatacgaaggctttttcggggaaacgttgcctattgctcgatgacgataaattacaattgacactttttgagaatcagttgaaacaattgggtatagaatcggttgcctgcatgaaggccgaggagattttgggttatctggaacatgagcatttcgatgctttgtttaccgatatgcagatgccggaaatggacggagtgagttttttgaaatttttgagggagtctcatatcgctctggcgagaaagcttccggttgtaatggttacggcgaggagcgatgcagaccaattcctttcggaaggtttttcgggaattttacacaagcctttttcgttggcgcaattatctttttgtttatcggggatttggaatgaagaggcaactccccgtgagatagaagatgagggtgaaagaggagaggctccgtatgattttgcggctcttacggcttttgccgaagatgatgcgaaggctcgccggaaaatattggagacattctttcaggagataaatagccagatagaggagttgaaaggggccgcggctcgtcgcgatgggattgtggtatcacgtattgctcataagtggcaaccgattttcgccatgttgaaaatttcggatatgttgccggtgttgtctcgattggaagaggaaggtgcgcataagtggaccgatgagctgtctcgaaatcttgataagttgttggtctatgctgagaaaatacgtacaggccttaaattggtattggcaaaggaggaataattatgaagcatattctcattgtagaagacgatacgacatttgctgttatgttgcagacgtggctttccaagaaaaaattttcggtagcatctgtttcgggaattgcagcagcgaaaaaaactcttattgaaagttcggtcgatttggtgctttgcgacttacgtttgcctgatggagacggcatcgatttgttggaatgggtgagcaatcggaatgtaaatgttcctttgatcgtaatgacgagctacgcggctatcccgtcggctgttcaggcgatgaaactcggtgcgagagattatatatctaagccggtgaatccggaagatttattgcaaaagattaacgaggtttttaatgcgggtgtcaagactgggaaacagattcctgtgtctgaatctgtaccggaggaaacaaattatttagaggggcagagtgaagctgcccgtcaattgtatacttatgtgaagttagtggctccgacctctatgtctgtgctgatcaatggggccagtgggacaggaaaggaatatgtggctaaacggatacatcaattaagtaaacgttcggagaaaccgtttgtcgccatcgattgtggagccattccgaaagaattggctgcttctgaatttttcgggcataagaaaggttcgtttacgggagcgattgaggataaagtcggtgcttttatagaagcagatggtggaacgatctttcttgatgaaataggaaatctgagttacgatgttcaggtacagttgctacgtgtgttgcaagaacgcagagtgaagcccatcgggactacaacggaagtaaaagtcgatgtgaggttgattgctgcgacaaatgaagacttgaaggcggctataaaatcaggtgcatttagggaagatttgtatcatcgaatcaatgaatttacgatctatatgccgcatttgtgcgaacgaggtgaggatataccgttgtttgctaatttctttttggatcaagccaatcgagaactcgaaaagcctgttcccggatttttgccggaagcgatggaacggatttctcaatatacttggccgggaaatttaagagaaatgcgtaatactgttatgagggcggctttacttgctcaggggaatcccatacgtgtggaacatttgggcatagacatgaatatagacaagccgataaatattttacacgatccggatagtgagcggactaagattgtatcggcattacagaaatgttcgggtaataaaagtaaagcggctgcaatgttaggcatagatagaaagacattgtataacaagttgaaattgtatcaaatcgagtaacttatatatttgtagaatataggatacggttcgtcatagtcaagtcggaaatcttatttccgcttgcctttgcacttatctctcactgtatttgaggataaaagggtgtggaatttttccacaccctttttctttttattctacaaatttccacataagatttttgtattctatttatttaatttatttataatcagttgtttgtgtattctttggaagtgttggcataacgattgttgttttatagtcgaagaatggaatatagaatgtataactaaaaaagttagaattatgaaaaagttaatgttatcagtagctgtgtttatgatgggagtatctactcttggtttgtatgcacaagattccaatgtagagcctgtaaagaaagatagtgtcccaaccgaagaacctaagaaagaggagcctaaatcagaggcagcttgggtttgtatgagcgaagaacctgctaagacagacagtgtgccgtctcaggaacccaagaaagaagaacccaagacttcatcggtttatatgaatgaagaaccggctaaaaccgatagtgtgccttcgcaggagcctaaaaaagaagacgttcaaaagatattttctatcagataacttttgtgaaagatattttataggctaaccctaaaaaacgttcttattttttatctgttttagtgaagatgatgatggtcccgatatctcctataaggaggtatcgggatttaattttctaatatttagttagatagatagaatgtcgtgaatatataatatgattagtaataataactaaataaataattctaaataatccatgcattttacatatatttgtacaatagaatttgtattttataactctgtttaagaggaagaagtgcaaaagttcgagggagaggctgattttatcgaggataacgtattgttgtctggaagcttaggctttgcctaaactaaaatagcaatggtggaaaacgacagtatcgggtggtatgtagcgaaaacgtatcggcaggaacgtaagatcaaagaccttcttgcccgtatgggtatagagcattttgtacctttccatcaagtcgtaaaggagattaacgggaagcgaaaaaaagtagaagagccttttgtgaacgggttgatatttgttcgaggaaataaaaaaagttgcattgagttgattaacgaatatgggtatcctatgagatatttgcgggatttttccactcgttcgcttttacgtgtacccgataagcaaatggaggattttatctatttggtagaccgtcatgaaaatgagatagaattgtttccccatgatttaaaacgaggagatcgggtacgtgtggtcgcagggacttttgccggaatcgaaggggagttaatccgcattgcaggccatcgtcgagtggtggttcgtctcgaaaatttattttcaatcgctacggtttttataccggggggatatttggaaaagatatgcgaccggtgattaaatatatttcattttatgattttgccgattctgggatagcgcggaattatagcgttgctgcggctaataaaatggattatatcattgaatctcttgtaagaatcggatatgacgtagaggtagtttcggcatcggcatgtatagaaagcgggacgtttcgatggtataagtctcgggttgaagagagacagcctcatgtgaaaacgagatttttctcgtcgtttcgttgtcgatctaaaatattagtcttgttgcgacttatttggggggtattgcaattattgagttatcttcttttttgtgttaaaaaaggagagtctatatgggtataccattctttgtattattacaatgtgattttgctggcaaaaaaaataaagaaattcaaactgattctcgaagtagaagagatttatcaagatgtttctcctgttcctcggtatatggaacgttgggaatgcaagatgatagacgttgcggataagtttgtgttttcgaccgatcttctgaatgataaagtaaataggcaaaagaagcctcatttagttatttatgggacttatcggtgtgtgcctgtgatgagcgaacggcacggagacaataaggtgcatgttgtctattctggtacacttgatcccaataaaggcggagctatggcggctgcgggtgtggcggcgtccttgccgtctacatatagagttcatatacttggattcgggaatccgggagagatacaggcgattaaagagctgtgtgaagagatgtcgggcaaaggcggtgcggtagtctcctatgatggggtactgaaagggagtgcatatatagattttttacagacgtgtcagattggcctgagcacgcagaatcctgatgcggcgtttaataatacctcgtttccgtcgaaaatattatcttatatgtcgaatggtttgcaagtcgtttctgccgatatagaagcggtacggcgagcttatggaatttcgggttatatttattattatcagaaacaagaacccagcgatatagcaaatgccatattgaatgtggatttggataatccttttgacacgcgggcggtggtacagtctttggataataggtttgtagaacaattgagtttgtttctccgtgatagagtttagtgatataaaagggaaatacataggtaataaaaacctaattaacaatgtactgggctctttccttgttcgagggttcggctttttggtttcttttgccttgtttcctctttatctgaactatttcgatgacaataccgtattagggtgctggttcacgatgtgctctgttttatcatggatacaagtctttgatttgggaataggcaatggcttgcggaatcatttgacggccgatttgagtttgaaaaactatgaaagtgcccggcaatatatatcatcttcttacattttgatgggaggtgtcactgtatttatttcgtttttagcatttataataagccgatatatagattggaattcggttttcaatatttcggaacaaagcatatcgccagagagtttgcgtaaaggggttgttatcgctttatgtggcgtattgtgttttttctttctgaaattgattatctctattttgtatgctttgcagaaatcggcgttacctaatttcttgaatctgctttctaccgttttattattgatttttctgtgggtatatgatccaaccggagatgtcgaacgagattttgtaacgatttcttgggtgcaggctgttacagggtgtttgccgttattggtagcgacaataattgtttttgcaaaagacctgaaagaatgtttgccgtcgttcaagtactttcggtgggataaagccactggtgttttgtcgttgggaattttgttccttgttttgcagttgttatacatgataattactgtaaccaacgagttttttatatcctactttttcgatccgtctttcgttgtagaataccagatatatataaagatcttttcaatcgccggtacatttgtgtctttggctctgattccggtatggtcggctgtgacgaaagcatttgtagaaaaacgttacgattggataatcaagttggtccgttttctgtattttgtcgctggtattgctgtattgtttcaattggctatcattccatttcttgacccgatattggaattttggttaggcgaaaaggctatcgaggtgaatttgtccgctgcattgctgtttgccctattggggtgtgtgatgatttgggtatcggttttgacgagtgtcgttaatggtttaggcacgcttaaatgccagttgtatggttttttatgggctgtactcttcaaagtcgtagctatcgttttattttcttcgtggattccgtggacgattgtaatcacagctacgattgtaggtttattgccctactgtgtctggcaacctgtggtgatgaacaggcagttgaaaatgttgaataaagaggcttttcaaaatgggtaagaaactgttgatcgtcaatacttatgccaatttgtggtcaaccggcaggattgcggccgagataggggagattgcggtaaaacatggttggcagtgctattttgcatacgcaagcgaatcgaatccttgctcatgtgaggagattagaattaataaaagcgttatatcgtatattatacatacctatttgttttcccgtattctcaatttgaaaggattcggttcttggattgagacgaagttatttatcagaaaaataaagaaaatagctcccgatataattcatttgcataatattcatcagaattttttgaatttgccacttcttttctcttttttgaaaaaagcgggtattccggttatttggacccttcacgactgttgggccgtgactggggggtgtactcatttcgtgtacaataaatgcgaaaattggaaaactggttgctatcgatgtccgagatgtggtaatagtgatacgggcggggaattaaaaggggtgttccgtactatgccgtgggtgttaagaaagaaagaagcatatataacttctgttccgaatctgacttttgttacagtctcggagtggctgtcgggcgtagtgagaagttcggttgtcggttctgtacctgtacaggttatttccaacggagtggacagtactcgattctatcctcgtaccgatatacaagccattaaacaaaagtatggttgtggcaaccgcttcatgattgtgggggtaagttctcattggagtgtgtcaaagggattatatgattattataaactgagggaattattgccggccgatcagttcgtggtcgttttggtggggataacctctgagcagaaaaacaatatacccgatggtatcatcggggtagagcgaacagagaatcttgatgaactggctcttatttattcggcggcagatgtggtgacgagtttgtcgtaccaagagactttcggacttactattgtggaagggttcgcttgtggtacaccggcggtggtctatgacaatacggcgttgcctgaattggtagactctgatacgggcttagttgtagaaaccggaaatatggagcgactggccgaggcgataagacaggtttgtaagacgggtaaatcgttttattcgcaggcgtgtcgggaagtggcgcaaacccggtatgataaattttgccagtatgagaaatatgtcgaattatatgaacaggcgcttgttccgaaaaaggtatgattgagacgatcgttattggtttaatatgtgtgtttttggcctatttggggcgttacagacgattgagctggggctttggcgcagcgatgaccatattattcgttttccttgcgatacgctatgaatggggaaacgactatcgtcaatatatagacaaatttacagtatataattcgatcgatgaatttaattattcagatcctaacgaacgatgggaagtcggttggatattcttgtatcggatattcaaaccattcggctttttttcattagtcattgtccttactgcatttgaaatatctgtttattattggtttatcaagaaatatataccgaaagaatggtattggttcgctgtatttatttatgtatttaatcctaatttcatgcttacgcaatcgtctatgatgcgtcagactttggctatgtgcatagttttgttgtccattccttatatttataaaaagaaggtcatcattgcagcgttatttattttatttgcctcattgtttcacagtagcgccaaaatattgttaccgatagtttttcttggatttgtgaattggagaatgggtaagaagggggtgattattggcgttgttctcttttttgctattctgttgttcaagaatattgttacatctataattgaaaatactctttctgtaacgggtttgggaaaatatacctattatctggaagaagggaaagaagaatcgaaattagagtcgggaataggctttgtttatcagattatcatcatgagcatgatattgtattatgaaaaaagacaagatcgaaaggacggattgattttcaaaataaccgccctttcttttcttttcgttccgttaggttttatcgctcaacttattgctcggataggtatgtatttgcaagtgtcaatgatagcaacttatccgctgatgattcgtacgatcaataatagaattgtacgggcaggaacactgtttgtaattatgtttttcactatttatgacttcttctcatttttcaattccgaaatttggagagattcgttcatagaatatcatactatttttgaatcttttatttggcgataatttgtgagaaaggcaaattattccttgtcaaagtatgagagtcgcttttttaatggggttattcccgaaggataatcggaatgagattataaagaatagccgggggccgatacaattcgctgcggatgccttagaatggggttatgtgaaaggaatcagtgagcaaaatattaaatgcgagttgtttaatgctccgtttataggctcttatcctaaacgttatggaaaaccgttctatacatcgtattcaaatgaaaaaatctcgaaatgggtaaatttgacgaatgtcggtttttgcaattatactggatataaattgattagccgatggatttgtatgaagaggtcgataaggaggtggtatggttcgtcctacggagatacgacagttttgattgtgtatagtattcatactccttttctgaaagcagcggtagatattaaacgtaaatataagaatactaaggttgtacttattgttccagatttgcctgaatacatggactctaaaaaatcgtttatccaatcgattttccatcatataaacaggagaatacaaaataagttgtatgaagatgtggacggttatgtgttattgagtaaatatatgcaggaacgattaccggtaaaaggtaaggccgtttcggttatagaaggtatgtattattcggagttcgacaaccattttctcgacggtgggatttgtatggaacaaagcgatgaaaaaattcttctttatacagggacgttagatgctcggtatggtatagtgactttattgagagcctttatgatgttaaaaaatcctagttatcggttggtcatttgcggtgacggggattctcgaaataccgttttagaatgtgtgaagatggataatagagtttcttataaggggcagttacctcgggaagagattcttgtgttacagcaaaaggcgacactattagttaatcctcgtacttccgaaggggaatttaccaaatattcgtttccctcgaaaactattgaatatttagcttccggtacgccagttctgttgtataagctcgctggtattccagatgaatattatgaatattgttttacggtggaagataactcggacgaagcattgtctaaaaagattgatgagatactgaatatggatagagcggttttgcgttcattaggaatgagggctcgaaaatttatcttgacagaaaagtcacctaagaatcaatgtaaaaaattggtcgatttaatagaaagaatagtcgaatcttaatttaatatataatcatgtctatttttaaagataagatattgcttattaccggaggaacaggatcctttggcaatgctgtgttaaagcggtttttggatagcgatgtcggtgaaatacgcatatttagccgtgatgagaaaaaacaagacgatatgcggcatcgattacagaacccgaaggttaagttttatatcggtgacgtgcgggataagcgtagtgtagatagcgctatgagtggggtcgattatgtgttttcggcagctgccttgaaacaggttccttcatgtgaatttttccctatgcaggctgtgcgtacgaatgtgtttggcacggagaacgtattggattcggccgtggagcatggtgtgaaaaatgttgttgtattgtctaccgataaagcggcctatcccatcaatgctatgggaataagtaaagccatgatggaaaaagtggcgattgccaaaggacgccagttgggtgattctgcgacaacgacaatttgttgtactcgttatggaaatgtgatggcgagtcggggatctgtgattccgctatggatcgagcagatgaaaaacaatgcggtaataacgatcacggatcccaacatgacacggtttatgatgacgctcgatgatgctgtcgacttggtagtttatgcgtttgagcatggccgtaatggcgatttattcgtacagaaggctccggcggctacgctggttactttggctactgcgttgaaagaattgtatggcaaagatactcccgtgaaaattatcggtacacggcatggggagaagctctatgaaactttggttactcgcgaggagatggcgagggcagaggatatggataattattatcgtattccatgcgatagtcgagatttgaattacgataaattttttgtcgaaggtagcgaggtggtctctcaaatagaagactatcattcgcacaatactcacagactcgatgtagaagaaatgaaacaattattgttgaagctcgatatcgtacgggaagatttgaatctcaattagtgggtagaattatgataaaggtaggtattaccgggcagtctgggtttgtcggtactcatttatataatacgttgggactttatcccggagaatttgagagagttccattcgaagatgattattttgtcgatgtagaacgtctgaaaacgtttgtaaagagttgtgatgttattgtacatttggcggcggtaaaccgtcatactgatgcgcatgttttgtacgagacgaatatgcgattggtaaaacagctaatcgaggctatggaaacgacaaattctcgtccttatgttttattctcgtcgagcatacaagaggaacgggataatgagtatggtcgtagtaagagtgatggtcgtaaattgttggaagaatgggctgtgcgtaatgggtcatcttttacaggaatggtagttcccaatgttttcggtccgtttgggaagcctaattataattcgttcatagccacgttcgggtataaattgactcacggcgattcccccacggtattacaagacaatgaggtaaatttgatttatgtgggtagtttatgccgtcatatttgtgataaaataagggagatgggaagtcgcaccgtaccctcgcttgtcgagcgggacgatgtagcctgcgatttcgagatgaaggtgagtgaagttctcggtttgtttgaaaattttaaaaaattgtatttcgagcagggaattattcctcctttgaataatatccatgaaatgaatttgtttaatacatttcgtagctatattgatatggaaagctatttcccggtgaaattggttcaacataccgatgtacgaggtagtttcgtcgagaccgtaaaaatcggggtgggtggccaagtgagtttttctaccaccgttcccggtgttacaaggggaaatcattatcacactcgcaagatggagcggtttgtagtgattaagggaaaagcgagaattcagctccggaaggttggaacagacgaagtactggattattatcttaacggggaagaaccggcttatgtggatatgccggtgtggtacacacataatatatcgaatatcggcgatgagattttatatgctcagttttggataaacgaatggtatgatcctaccgatagcgatacttatttcgaaccggtagtgaaagacgagtgaaaaatcaaaatatagatttatgaagcgattgaaagtcctttcggtagtagggacaagacccgaaataatcagattgtcatgtgtattgcaaaagttagatgccagtcccgccatagagcacgtattggtacacacaggacaaaattacgattatgaattaaacgaaatattttttcaggatttaggtctacggaaacctgattattttttgaatgcggcaggtaataatgcgacgacgactgccggacagatattgattaatatagatccggttctggaagaagttcgtccggatgcatttcttgtattgggcgacacgaattcttgcttgtgtgcgatagcggctaagaaacgtcatatccctattttccatatggaggccggaaatcgctgtttcgaccagcgtgttcccgaagagagtaatcgtaagattgtcgaccatatatcggatattaatttgccgtacagctctattgcccgtgaatatttgttgagcgagggaatcccttccgatcgggttgtcaaaaccggaagccccatgtatgaggtgctgaacaggtatttgcctcagataaatgcctcgtctattttagagaatctgggattggagaagggcaaatactttgtcgtgtcggcccatcgggaagagaatatatcgagcgaacgcaacttcgggaatttggttaagattttgaacgacatagctcaaacgtatggttttcccgtgattgtgtcgacacacccccgtacccgcaagaaaatagaaaccgatggtgttgactttcactcacttatacggttgatgaaaccgatgggttttagcgattataataaattgcaaattaatgccaaaacggtaatctcggatagcggaaccattagcgaagagtcgtctattcttaattttaaggctctgaatatacgtgaagctcacgagcgtcccgaggcgatggaggaagcttcggtgatgatggtagggcttaaccccgaacgggtgatgcagggtttgtccgaattgcagaatcagaatctcgaaactcgtaattttcgtccggtcgcagactattctataccgaatgttagcgacaaagtcgtgcgaattattctttcttataccgattatgtcaaaagagtcgtctggggtgaaaggtaaacgatgcttgtttttgaccaattatttttatcccgaagtttttcgaggtaacgatatcgcttttgaaatggtaaaacgaggatatgaagttactgtaattacatgtattcccaattatcctcagggccatttttacgagggatacggattgcggagcaggcggaaagaagtcgtcaatggagtaaatgtcattcgtgtgccggtgattcctcgtggagacggtagggcgataagaatggtgctcaattatttatcgagtttattattttcttgtatatacacattaagtatcgtttgtcgtaagagattcgactttatttttgtgcaggaattgtccccggcatttatcggtataccggcagtgcttgcgaaaaaaatacgacgaattcctatttatttctggttacttgatgtttggccagaaagtttggctgccggaggtataactaataaatatatcgttaaaatagttgatcgtatcatgcgctacatttatcggcattgttgcaaaattttcatagcggcatcgggtgtgaggacattgttacagcaacgaggggtaaaaaatgattgtatagaagatttacccaattggggagaagatgaacttcgaaaatgtactgttgatgacgatgaactgccacatttgccagatggttttaaaattatgtttgccggaaatttaggtgaggcgcaaaatcttgaaaatgtgatgagagtagccgaacgtttgaaaaacaataaacatatacagtggatttttatcggtgacgggcgaaagaaaaaatgggttatgtcgttcgttcaaagtcgggagatgggtgataccgtacatttttatgatcgttatcccattgaatatatgccggcatttttcagaaaagccgatattatgctgcttcctctttgtgacaatagcgcattcaatgtgacgctaccagcgaagatacaggcttatatgctcagttctaaacctattttagtcatggcgaatggtgaagtacaaacggttgtaaagaatgctcgttgtggatattatacaggtgcagattctattgacaagatggttcgtttagtcctttccatttcgaattattcaaatcaagaattggaagaaaagggtagaaacggatataattattaccagcggcattttaagaaagaaaaatgtatgaacaatttattcgaaattattgagaagggagaacgaagtaatgtctgagatattaatagatcatgttttactcgatagggtgacaaaggctgcaaaggaaagtcctagattgcgtatgaattataactttcacgaatcgttgtcgtctccttcgcaacgtctgcttaatgcccttgaactgggaaccgttttaccgatacatcgtcataggcatacggccgaaacttatgtattgttgcgagggcgtatgagagttctcttttacgatgacgacaagaaggaaattaatcgctatgaactcgacccggcggagggtacttatggggtaaacataccccggggacaatggcatacaattgaggtgttatgtgctggtactgttatttttgaggtgaaagatggtccgtatatacctattgctcctaatgatatgttagaatagacctcctccgtatagtattataatgcgccaaaatttattcatagtttgattattagatttttttgatttgtatcactatcgtatcacaactatgcaaaaataggaaaaaattggatatattttgccatataaaatgtgttgttcagcaataatttaggagggttgaaaagcctgttttataacataagtgcttgattaatagatataaaaatagggattagcattttgctaaccccttactttttgttgtccgggaaggattcgaaccctcacaggcggaaccagaatccgaagtgctaccattacaccaccggacaaatttgttttgcgagtgcaaaattgcgaatttattttgggacggccattgcaaaccttgaattttttatttggtttaatctttttttacatatctatcctttcaatggcaatgccgattctatgacggcgtatgattttttcatgaggtcttctatatcatgccctttattttcttggggatagatgggggggtgtatcgttaaaatgatttttccaggtttaaaattgtaggttgtacggggcataacggcaaatgctccgtcgatagtgagcggtgcgaccggtaaggaaaattcaacggcgagttgatatgctcctcgtttgaatggtctcatggctcctgtccaagtgcgtgctccttcggggaatacgacaagcgacataccattttgtaatgtcgtttcggctttttgcagggtttcttttagtcggcccggagtactgttatcgacgaatatgtggccggcagcagcacaagcgctgcctacaaagggtatattgcgcaggctttttttcatcatccatttgaaattgtggtttaagtatccgtagatgagaaatatgtcataggctccttgatggtttgatacgaatacataagatgtgtttttatcgatgttttctcggcctctaacttctattttgacaagagagagaatgcagaatagtcgggaccaaatgtgtgctgggtaatatccccaaaagtttccattgcccaaccggcatccgataagggtcgtcaatgctgtgagaatggtgattatcagcaatatgggcatggctatgagccattgatataggaatgtgatagtgcgtatcattgttcgatgctattttcgtcgtttacgggacaaaggtaatgaatttgcagtaaatcgcattatttgcaggcgcttttgatgtgggaatatagaaaaggcgactcaataagccgccttttctatattcctaaacgttgcagtttatttggtttttgcttcgacatctggggcaatgagcttgtacccttttccatgaatattgataatttcaattgatggatcgtctttgagatgtttacgaagtttggtaatgtaaacgtccatgctacgagcgttaaagtaattatcgtctatccaaatagttttgagggcgaagttacgctccaaaatttcattgacgtgagcacagagcagactgagcaattcggactctttggtggtgagtttagtactcttatcgtcgattgccaatacttgtttctgggtatcgaatgtaaaccgtccgatcttgtacatcgtaacttcttttccttttttaccttttacacgacgtaaaatggcttcgatacggaataccaattcttccatactgaatggtttggtaatgtagtcgtctgctccgattttgaatccttcgagaatatcttctttcaaagatttcgctgtcaagaatatgatgggaacttctccgtttaccgtacggatttcttgtgcgagcgtgaatccgtcttttttaggcatcatcacgtcgagtacgcacaaatcgtatttacctttcaggaatgctttgtatccgctttctccatcggagaagagatcggccgcataacctttggcttgcaaatactctcttaataacatgccaagattttcatcatcttcgcataatagaatacgcaatctttcttccataatcatttgttttttattagtggtagtgttattataaatgtcgacccttgatttatttcgctttctactcgaatatcgcctttgaggtcggtaatgattttatggacgtaggcgaggcctagtccgaatccttttacgtcatggcgatttcccgtagatacgcgataaaatttgtcgaatatttttttcaaatcttcccgtttgataccgattccgttatctcgaatcgatatttctaccttatctccaacggttcttgtacgtatgaaaagagataaaggttcttcttcccgtcgatattttacggcattgtcaaggaggttgaagataacattcgtgaaatgcatttcatcgaccgagacaatagcatcttctgcttcgaggtcggcatcgattacaccgccgtatttttcgactttgagtttgaatgtgctcatgactcctgcaacgaggtcgttgacatcgacgttgtgtagtttcatcaacgtcttttgtctgtcgaacatcgacatttgcaggactttttctacctgaaatctcaatcgcttggtttcgtcattaatgacacccgatatgtgctggaacatagccggacttttggcaacagaggggtcattaagcatttgggctgctaatgatatggtagatatgggtgttttgaattcgtgtgtcatgttgttgataaaatcgtttttcatctcggtgagtttcttttgccgaaatgccgtgatgatggtaaacaagaaggttaccaacagaatgaacgtgaaagcaaacgagggtatcatgaattttaccgaactcgatatataatctcttttggtcgggaaatagactttcaagtagtttatttttgccggtggatcattgggaaatattgcttgtgtgaataaattcccttcgattttgggatcatattgattggagctatatatgattttttcgtttttattgtaaatggcaaattggaacggaaggtttaatccgttattttcaaattctgatttcagatagctttccaattttttgatgtcgatacgttccatgacaggacggttacttgccttactcagcatattgagtatgacttcgttcaacaagcctttttggtaaaggtattgtcctttacgggcttcctgcatatttcgatatgtactaatgagcgtattgtgttccttttgtcgtggagcagcaggggtgataatcgtactggtttgttcgcgaaaggaaaaacttgcaaccgttccatcgggagatacgatagaaaattggtggtgagtagaagctatgtcttgtttgtcttgcttttgctcataagaggagagcattttcttttcttcctcttccagatattcgtctaaatagcgttgagtctcgtctagttcaaggcttgtcgatacagcgtataggcttcttttcacggcttcggtaaattgctcgtttctcatttttatcatattctccatgtacatgatttgtacataaagcaatccgataaacgtgagtgccataattacagccagtagccaaattgtcgactttttcattctgtttgcctctttatttttttctgtttaacttgtcgtggtgtttaaatgatttgtttttacatcatttgtacaaatttattatataaacaccgattccactatttttgttttattttatgaaaacctatttagaaggttgggtttaacacttaccggcaaatttaacaaataaatgtttatttgcaaaaaaagccattggtttttccaatggctttttaattatttaacaaaatcgcggtcactcgtctgtctgttcggcctcgtaagctttaagtagtttttcttgaacgtcagatggaacgagctcataagatgcaaatttcatagagaaagatgagcgccctccggtgatcgaactgagagctgttgaataggaagacatttcctttaaaggtacttttgccgtgattttttcaaatcctttttcactagacatgcccataataatagcgcgtcgtccttgcagatcgctcatgacatcgcccatgacatcggctggggtaagaacttcgacatcgtatataggttcgagaatttttggtcctgcatttttaaatgcctcgctgaatgcattacgtccagctaatcggaaagatatttcattagagtctaccgggtgcattttcccgtcgtagatacaaactctgacatcgcgggcgtaagaaccagtgagcggcccttgttccatacgatccatcaatcctttgacaatagcaggaataaaccgagcgtcgatagcacctccaacaatacagttacaaaccaccaattttcctccccattcaagatctatcgtttgggtatcgcgtacattcatacggaattcttggttgttgaatttgtaagtgtcgggtgctggcattccgtcataatagggctctacgatgagatgtacttctccaaattgtccggctccacccgattgttttttgtgacgataatccgcccgagacgctttagtaattgtttcccgatagggtatgcgaggctctatgaattcaacggcaagtttatcgttattctcaatacgccattttaaagtgcgtaagtgaaattctccttgtcccgaaacaatcgtttgtttcaattctttggattgttctatttgccacgtcgggtcttcttcatgcatacgagtgagaatctcacttaatttttcggcatcggattcattgaccggttttattgctcgttgatatttgggagctgggtatttgataaaatcgaaatgataatcgcacccttttgtgttgagtgtattaccagtgcgcacatcttttagttttaccgatgctcctatgtctcctgctacaagttcttctaccggagtacgaatttgtccgcaaacacagaataattgagccaaacgttcgcgtccgtcgcctcgatccacattaatcaaatcgtctccttgatgtacggttccagacattactttgaaataggatacttctccgatatgaggctcgaccgtggttttaaagcagtatatacttgtaggcccattggcatcgggagcgattttttctccggctgtattttcgggtttgggcatttcggagacaaaggggactacgttgccgaggaattccatcatacgtcgtactcccatatcgcgtaatgcgcttacacagaatacagggtatatgctgcgtgtgatgagacctttgcggatgccttcccgcatttcatcttcggtgagagaaccttgctcgaagaatttttccataagggtctcatcgttttcagcagcggcttcaactaatttttgatttaattcccgggctttttccatttcgctttcgggaatttcggatatggtgggtgtaccgccttcgggcgaccagctatacattttcatgagtaggacgtcgatcatggcattgaacgacggaccgcaactaagcggatattgcacttgtacaattcggttaccgaatgtttcgtgcatttggttgattacattgtcgtaatctgccttttcaccatcaagttggttcatggcaaaaagaataggtttgttcagattttcggcagtacggaagatgttttgagttcctacttcgactccatattgagagtcgatgacaattactcctgtgtctgttacgttaagggctgttatagcgcttcctacaaagtcgtctgctcccggacagtctataacattgagctttttacctaaaaattcggcataaaaaactgtggaaaagacggaatatccatactctttttccacaggaaaatagtccgagacggtgtttttcccttcgacggttccgcgacgttttattacaccacactcgtagagcatagcttctgcgagggtggtcttgcctgaacctttgctgcccaatagagcaatgtttttgatttcgtgagattgatagactttcatgatattaaagttttaataaaacaaaaacacttggttacgttttaacaaagtgttcgcaaattatgaattatatttttaaaaagcaatggtaagaactatgttacaaaacattgtttatgaatcgaagttttgtatttttgtcgagtaatggctgggctttatattcatataccgttttgtgcaagtcgctgtgtttattgcgacttcttttcctcgaccgatttttcgttcaagcgtggctatatagatgccgtttgtcgggaacttgaattgagaatacatgagctaagggacaaacctgtttttacggtgtatcttggaggggggactccgtccagtttatcgccgtcggaacgaggtcgtttgtttcgaactctttccacagttgtcgattggtcgatttgtaaggaggttactcttgaagtgaatcccgatgatgtgacacctctttttataagtcaattaaaggatactccggttaatcggctaagtatgggaatacagagtttcgacgattcggatcttgtttttctacgtcggcgtcatacggctcatgcggcgatggaggcagtcgataattgcctttgtgccggatatgaaaatatcagtatagacctcatatatggtttgccgggacagaccgtagaacgttggacgaacaatttgagacaagccgtaaccttgaatgttccgcatatttcagcatataatttaatttatgaggaaggtacggcgttgtggagaatgagggaaaaaggactggtgaaagagtgtgaggaagaagaatccttacagatgttcgagacacttatcgatgtgttgggtttttctggatatgagcattacgagatttccaatttcgcccgctctgggcgttatgcacttcataatacatcttattggaaaggtgtaccgtatctgggtttaggtgcggcggctcatagctacgatgggaagagcaggcgtatcaacccttcctcattgtcggaatatatggaggctttgcaaacgggacatgttgcatatatggaagagaaagagacggtcgatagtttatataatgaatacatacttacatcgcttcgtacctgttggggattgaatctgaaaaaactcgaagacgactttggaactgagcgcatgcaatattgcttggaacaagctctgcctcatatccgtgcagggcgactcgtggtgaccgacaatattatgcgcataactcgtaagggtctttttacttccgatgatgttatgagcgatttgttttgggtggattgaatctcgaagatttttcaatctcgccgtttctccttgaatttgtggagtcgtttttctgtcccccccaatatagtgtatcgcaagatggaatagggggattatagtttcaatttataacctaaggagataaacgtattgagttgttggggtgtcttactcatgagatgttcttctcgaactttgcattcgatggaattttttttatctattcgatattctacccctgcatcataccatattctatccaattctcctgactgtttaccattcagaaaaagaaatatatcggtatggataaacggagtccatcggctgtcgggtatggtgtaactgagaagtattttgtttcgccatttgttcgatggtttggccgtccctatggtataggtggactcaaatcgggaattcagcgatagggagaatcggtgtacaggataggaaaaagtggctcccagttgataacgatgacgattcttataaatattcggggctgtctgttgattcatatagtagtacagcgcatttaatttgaggtatttcgggacggcagtataggagacgaccgcaatgggcatgtatcgttcgtaatatttaccaagtgtccatacgttttgctgtatttgcagatttatccgatttatttgtttggataccgtaaaattccacaacgtgcctatttcactgctgtattcttttgcgtttgtcgggaaagtaaagagagaaagtgagataatgaagacggatagaattttgtaatgaaaacgattcatatttattcgtggtgatagggttcgttattgagaatagtcatagcccgatagagttgttcggtgaagatgaggcgaatcatctggtgagaaaaggtcatctttgaaagagaaattttttcttgtgctgcattgtatatgcgttgggaaaaaccataagggccgccaatgacaaatatcaagcgtttggcaacgtttgacattttcttttccaaataggtggcgaactgcgtggaggtaaactcctttccatgttcatcgagcaggacaatgtaatcgccgggcaggaaacttttcaagatgaaatcggcttctcgctctttttgttggtcggtactcaggcttttggtgttgcggagttcgggaatgactgcaatttcgaacggcacatagtgagccaatcgtttgctgtattcttcgattccttgtataaaatgagattcgactgttttcccgacaaccaatagcactattttcataaggacaaagttacggctttttttgtatttatcaaagttggattagtagtctcttttacttcggcatagaaataataaagggattcaatacgcgtttgaatcccttacatcctttttagagtgcagatatagtgacttaaatagcctatatgggcactttcaggggaacaaagataaatcaaagaatctcgaattccaaattttatatgattatttttgtgcaatcggctacaatcttttttgtttcttgagattgtatatttttaaaagtgctgataatttcgttattcagatcttctttccggttctttgatattgttcccaaaatatattttatcacggcgataacgccatttatattgtggcgactatctctgtctatatttgcaggaatagcttttatgcctatcggtatagatatgttataaatacaactaccatgagcgcaccgattccgaattactcgtatggtatctaaatagttaatgaatacgccggttgagcatccataatgctgggcgattatatattttaatcgctcgctttttatcgatttatagagcgatacgatattacctaatgtcataaattcaatagttttccaagcgggagggtatttgtcgtctgggtatctttggtgatgccgtttaataatgggattgtcttgcattgctttatataccatgatatcgaagttactaatgaaatcggatttcataatatcgggattggcgaaccatgttggagagtctgtataatagtttgatacggtatatatgatttgagtgcgtatatttacctctattctatcaagggcatttagcaatattcttcggagtttagtgtcaaattcatataaatcgtatacacttttgaatgtcgtccctttttttagcttgtggtctcgattgtttattcgagggaatgttgtttcaaaaggaaatgaatagaaccccaagcggtagtaacctatgtcaagtagaatttcttttgctttttcttcattgtcaaattccattccatgagatttaagtttggctatttgttggtctatattcagagcttttttcatggtactcaaatttttttgtaaatgtaatattttgtaaagaattagtgggcggtttaaaggttatatttttgattttacaatagagtcgggattaatttgtaactttgcaatcaattgataattgtatttttgagaataaatgaaaacgtattgaaagatgaaaacgaaagagcggttgatagatgaattgatagatttggcttttgccgaagatataggagatggtgaccacactactttgtgttgtatcccggatacggcgatggggaagtcgaggttgttgatcaaggagccgggtatcttggccggagtagagattgcccgaaaaatattccaccgtttcgatcccgatttgaaaatgacggtttatatcgaggacgggactgcggtaaaacccggcgatgtggcttttgtggtcgaaggacgcgtacaatcattattgcaaaccgagcgtcttatgctcaatgtgatgcagcgcatgagcggtatcgctacgatgactcaccggtatgtgaaaaaactcgaaggattgcatactcgcattctcgatacccgcaagacaactccgggcatgcgtatgctcgaaaaagaggctgtgaagataggtggtggcgtgaatcatcgtatcggattgttcgacatgattttgctgaaagataatcatgtggattttgccggtggtatagagaacgctatctctcgttgtcatgattatttaaaggccaaaggcaaggatttgaaaattgagatagaggtgcgtaatttggacgaattgaaagaggttatgcgagtgggcggtgtggaccgtattatgctcgataatttctcgcctgaattgacaaaagaggctgtgaaaattgtgggtgggaaatatgaaatagagtcttcgggaggtattactttcgatacgattcgagattacgccgagagtggtgtcgattttgtctcggtgggagctctcactcattcggtaaaaggtctcgatatgagctttaaggcttgttgaaacattagtttgctacataaaataaacgaggccatttctttattaaagatggcctcgtttatttttatttcgaagaatcgagaagacggttattaattattaaggactaaacgaaataccatatctccgggctgttgctcgataaaatcgctgtattgcacataaaaagctacgcttcccggcatgtaatcgtaggtgtaagtttcggtccaaagcatcgcattatccccgtttgcttcgcctttatgtatcgtataaggtagaggggtgatgacttcgttgtctgcccccggagattgtaccaagtaccccaagacatatccgtcgatatataaatcgtctgtaatatctttattttggaactcatacatgtaatacgtatttaatccgtcgggcgatgtcacaagttgccagtcttgcgattttactgtgtaggtgtagtacttccaaaacattccttcgcccggaactccctgaggaccttgtggtcccataggaccctcgcaggaaagtaaagtcaaactcaatataaccaagaataaaaactttttcataattctatttaattaatggtttcatgacaaacatagcgaaaggtgagtgcaggggcaaacggaaatcatgtttccgaattggctctgccgaaccgtatcctatattctacaaatatagataaagtatttcaaatataacaagaagtctcaaaaaacggttctgatttcagatatttttattttttatgatagttgaatggaccaatggtattttatgtgaaaaatatagggcgtagctatttgaagtatctttatgttataaaatgcttatgctcctgttttagctcctgaataattcgtacctttgtatcgtaattgtgaaattagagattatggcagagcgtaattcgccgttgatacttggaaccgagccgattggcaagttgttgattcagtattctgtaccggctattatagcgatgactgttacatcgctatataatattatagatagtatatttataggtcatggggtgggtgcattggctatcgcaggtttggcaattactttcccgttgatgaatttggtggtcgctttttgtacattggtcggtataggcggtgctactatcagttctatttttttaggtcagaaagataaagtgcgagcaacggaggtcgtacataatgttttgattatgtgtataatcaatgctgtttgctttggcggtttgacttttttatttcttgattccatattattgtttttcggggcaagtcacgatacattgccttatgctcgtgatttcatgcaagtgattttactggggactcctataacttatgtgtttatagggctgaataatgtaatgagggctacggggtatcctcgtaaggcaatgttttcatcattgttgactgtggggtgtaatattattttggctccgatatttatattttcattcgattggggaatacggggtgcagcgttggcaacagtcgtgtctcagactgtcgctatggtgtgggtactcgttcattttgcgaacaaaaaaaactttattcattttgacagtcggtactcccggttgaaggtgcgggtagtcgctaaaatattttccataggcatgtctccttttttgatgaatgtttgtgcctgtgtggtggtgatttttattaataatgcgttgcaacatactggtggagatttggctatcggtgcttatggtattgtgaaccgtactttgatgttgttcgttatgatcgttatgggaatcacacagggaatgcagcctatcgtggggtataactatggagccaagcaatatgaccgtgttcgcaaaacattgcgatatgggattacggcgggtgtggtcgttactacggtgggctttgtattgagcgaattattcccccatgctatcgtggcgatgtttacaaccagcgaggagttggtcgatttgtctgtgaccggtcttcgtatcagttgtgccatgttcccgtttgtcggttgccagattgtaatttccaatttctttcagtcgataggtagggctccggtatctatatttttatccttatcgagacaactgttgtttttattgccgttgttgttgattttaccgacttactggtctacgaacggagtttggttgagtatgcctatctctgattttatcgcattcgtgatagcggttatggccttgtggatacatcaacggaaaatcagacaaaaatttcaaactgttcaatcttaaaaaaaataaagctatgaaaaaaagattaactatcgcgctagtggcgcatgataatcgtaaggccgatatggtagagtgggtgaaacataatgccgagttgttgtctcatcaccatttggtttgtacaggtactaccggccgattgattaaggaggcattcgacgaattgaatattccggccgatgtgacttgtatgaattcgggtccgttggggggagatgccgaaattgccgcattggtggttcgtcatcaagtcgatttggctatctttttgatcgatgatttgaatcctcaaccacacgaggccgatatacagatgttgcttcgtcagtgtagagtacacaatgtacctatcgcttgcaaccgatacagtgccgatttgatgattaccagtactttgtgggacgatgattcttataaacccacagaaccgaaatacacttattttcaaaggtgaggtttgagcatgtgatattacaaaaggcgatagaccgtatctctatcgccttttgtatataactacccttcgatttcacttagttcgagccagcgtaatgtcttttcatcgaggctttcgttgatttccggcaatcttttagattgcagcgtgagttcttctatgtttagggttccgctgcaaaggttcgtttcgattgtttttttctcttcttccagcgcagcgatttccatttctaattgttccagctcttttttctctttaaaagaaaggcgtcgtcgggtattgtcagatgtatttcttttttcggcagtagtctttttattgtcttgctttgctttttctgcctgttcgcttttagccttttgttcctgtgtttctttccattcacgataatcggtatagttaccgggaaagtcttttagttctccgtttcctttgaacacaagtaggtgatctactactttatccatgaaatatcggtcgtgggagatgacaatgagacaccctttgaagttacggagataatcttcaaggacgttaagggtaacgatatccaagtcgttggtcggttcgtccagtaccaaaaaattgggattactgatgagtatcgtacataaatataggcgtcggcgttctcctccacttaatttatatatatagctgtgttgtgtctcgggggtaaagagaaaatgctgcaagaattgagatgcggacagcttacgtccgtcgccaagtgaaatttcttctgctatatctcttacggcatcgatgactttcatctgttcattaaaatgtaacccatcttggctataatagccgaactttaccgtttctcctatatcgaatcgtcctcgatcgggttgaatttcaccgacgagcattttgatgaaggtcgattttccggttccgttgttacctacgatacccattttttcatagcgggcaaaagtataatcgaagttttcgattattttcaggtctccgaattttttacagataccttttgcctcgaatatctttgaaccgatgtatgacgattttacttcgagccgtacttgcccgtctgatttttcctggcgggctttcgcttgtaattcatgaaaagcatccacacggtattttgcttttgtgccccgggcttgcggctgtcgccttatccagtccaactcggtacgcattaaattgcgggcccggtcgatttcggcattatgtatttctatgcgctcttcccgtttttcaagatagtagctgtaattaccgttatagttgtatagtgtatgattgtcgatttcgacaatttggttgcatactcgatcgagaaaatagcgatcgtgcgtgaccatcaatagggttatgttggtgcggcgtaaaaattcttccaaccattcggtcatatcgatgtccagatgattcgtcggttcatcgagaatgagcaggtcgggttcggtaattaagacattggctaatgccagtcgtttcagttgtccgccggacaattcttttacaggctgatcgaaattgttgattttgagctgcgaaagaatttgtttggctctttgctcgtaatcccatgccttgtagtggtccatgcggtcgagtagttcttgcaggccgataggatcatcggtttgtagggcctgttcgtattcggctattaaacgaacagtgtcgttgtcagactggaaacaagcttgtataaccgtgagttctggcggataggagggggattgttccaagtatcctacccgtaaattattccggaatacaatgtttccactgtcataattttctttccccgccagaatattcagtaaagtcgttttccccgctccatttttggcaattaatcctattcggtctccttcaccgatacctaacgatatattttcgaagagaattcggtctccgaacgactttgtgagattttctatttgtaagtagctgatcattactttgtattaaataccagtcaaatttacgataaatgttgtgattggacaaatgggaaagagttgtcttcatgaaagttttaacgatttagtgtgtaatagaaaaattacgcgagtgtttcgcattgttaatttattctttttttcgaattctatggcttgtatcgggttaaaaatcttttttgtcaaaaaaataaccctaaaaagtttgagtttaagaataaagttttacctttgcaaagtttgattgtgctcaatgatacaaaagtcttgagttttaccaatcttgttatcctatctatctacctgaaacacaacacacaaacgccgacattatccgttattgcaagactgttaagcatttggtcggaagtgcagagtcttgcgggaaaaatccatttttttagataataggtttgaatgaagattcccacgccatgttggaagtgttcagaggcttcatagcttttctgtaagattttttttgtaaaaaaagtcgcttgtatttgtctatatgtaaaatatactttacatttgtgtcgtgactatttcttttatcgattacttaaaataattgttattatggaaaaaatctttttgttgcctaatggctttaagaaagttggctggattattttggttccaacatttgtgctgggagtattgatgacgatagacggttataatggttttccatctttcttgctacccgaatggattcctttggctatgaaaagagtactgacttcggattgggttggaaaaatattgaataatgtcgccattataggcatttgcttgggttgtttatttgtggcatgttcacgtgagagagtcgaagatgaattaatcgggcggataagattgaactcgttgttgatagccttgtatatcaattcgtctgttttgattattttatctcttttttgttacgagcttctgtttttgaatgtcttggtctttaatatgtttacgaatattattattttcttgattgtctttgaaatgaaattgtggaaacttaaaaagtcgttgagagatgaagaatagaatacgagtggaacgtgccgaacttcgtataacccagcagcatttggccgatgtagtaggggtgagccgacaaaccatcaatgcaatcgagactggtaaatttgtgccttctacggtgttagcgttgaaaatagcccaagtattcaataaatcggtagagcaagtttttcaactggaaccaagtgactgaaatggaatgttctgtgaagaacagggatttggataaacgagaaaagcctgtcgcatgcgacaggctttttattatattatagaggatcgtatcccgcttctcgggctaatgatttgtcttcgtttactcccgatcccagcgttgtgagcatgtcgcccatcaatagtccgtttactccggccgatagtgcttgcttttgtgtttctctggataacctcgcccgccctccggcaaaccgaatgaacgtccgtggcagtatgaatctgaaaattgcgattgtaactaaaatctcctcgtcgctgatggggggcatgtgttccaaaggtgttcccggtatgggattcaagatattcataggaacagaacagacccctaattcttttagttcaaaagccaattcgatgcgttgtttcatattttctcccataccgatgattccaccggaacagatttccattcctaactcttgggctgtccgaatcgtttcttttttttgttcaatggtatgtgtggtacatagctcggaaaaataggacgaggctgtttctaagttgcagtggtagcgttttactccggcggctttcagcttttctaattcttctcgtttcaatagtcccatagaggcgcaaaggtgtaagtgggtttcttctcccatttttcgataaatatcgcagaaatagtctatttccgaggcttttatccttctcccgctggtgaccaaagacaatctttttattccttgttgttcgtttaaacgggcaatggatgtagcttcatgtatgggtatagcgtcgtatgtttctatttgggtgtgatgatgggccgattgggcacaccatttgcagttttcgggacaatgaccagaacgggcattgatgatcgagcaagtatcgagcgttttattacagaattttttacggatttcgtcggcagcagtatataggtccgaacgaatggctttttgtgctaattctaatgcttcgtcgggggtaatttctccgccggcaagtatacgctctttaattttttgcaacatgattccttttttgtgaatgggctattatttataggatacaaatgtaaatttttttaggaacaatacaggccgagacttctataaaattatggagaaaaaatttattgtgaaatatgtttttttaattgtttcgtttctaagtagatagaaaattttgtgcatttttttgtggaatgctattgttatctaagaaaaaatatctacttttgtgcccgggtaagtcctatacggccagctccctgtgaatcccccagggtttgaccgcagcaagggtagccggttgtagcggcgcgatgtagatagcttacccacctgccgatatagctcagttggccagagcacgtgatttgtaatctcggggtcgtgggttcgaatccctctatcggctcaaaggacactctaaaaagagtgtccttttatttttagatttcagtcattcttcttttggaatatccaagaactttaattatttatatgtgtttaaattacaactattgttgttaaatgtcttggttatgaaaagattcgcattttatctccttcctatactattgtgttttgcagtaggattgtcggccagttattttcagtctgattctatttctgagtggtatccattgctgaataaaccggctcttactccgcccaatggagtttttcctattgcatggagtatcatttatatttgtatgggactttcattggggcgcttgatagaaagggatgcgaataaaaccttgtcggtgttatgggggatacagttagtcgttaatttcttatggagcttattatttttcgcatttagaaatccgtttttgggattgatagatattttattactcgatattttagtgtggatttatatatcaagggcatatcgaaaagagaaagcggcggcactgttatttgtgccatatttcttgtggcttcttttggctacatatcttaacggatatgtatatttgtacaattaaaaaattcttcttatggaaataacgcatgatttgtcgagaaaacagtttcagactgtcgctgacgggaaaactgcatacgtgtcgtatgatcttgtcgatggttgcttgaatatagaacatacgattgtcccccgggaaatcgaagggcggggtatcgctgccgctttggtgaaggctgcttatgactatgcgcttgaccatgacttacttccggctgcgacatgccggtatgcgacagtctggttggatcggaatcctcaatacaaagataaggtttcgtctatgaaatagtttagcggtcttttcagcaaaaaccgattctatttctaagagtctgtctttcatctatttcaaagcaagctacatcggcatgtgtgattctgtttcgtgaaaattttatgcccgcctcaccgagtcggagataggcgttttgcataatggttcgcgatatgattttcatggttcgggcgtttgcataacaagaatattggtcggaacaaaggtattctatgtaatgctgcatgatactttctgctttttgttcaaaagagaaatctttgtccgatagcatttgtttcaggatttcgaataactcttccgaggtatagtcttcgaaaattaaagtgtggtcgacttcgtgagcgccgttatcaattaactgttctaccaaatcttgccggggagcccggttctcggcaatgatgagagcatgagctccgggcatggcagaggtgtatcctgctaacttgattcgtagttgttcgctatcaaatgtgttgtatgcatttttgaatttcggagagtcgccatcgatgaataaaagtccctgtcgtgactttttcatggcatcttgtagaacttcgtccactttatagtctgggacattgtagagctgttctccttttatttctataaattgtccgttgccgagtatgttcatggctttcagtaagtcggacataatttcagcgactgtgctttttccggttcctgtatttccagcaaagctccatttcaaagggatttccccaaagaaattttttccgttctcgtgtaataaccgggcgatctttacaaagttatggattgccgcttttacattggataatccgatcattctgtcgagtcgggctaagcattcatctatggttcgttcatcgaattcctccgaagatatgattattttttcatcggtgttatctggtatatcttcttgttcgatggtgacgagcgaccgtttgtcgggattccccgaatcgtatattccgctttgagccaaacgagtggccatagccggaagtattttcgaagagataagtctgttgacatagcgggcgttcccgaaatggcggtctctgtttcgatggtctttttttatcagttctaatagagtttgacgagcagagtcggttatttcgtacccttcgcgttgtatggtgaggtcggctatctccaataattcttcgggtgaataatcttcgaagtgaaatgtaaaaggaaatcgggattgcaagccggggttcgattccaaaagcagtttcatttctgccggatatccggcgagaataacgattgtcccgaagttgtcgtccgacagtttcggtaataatgtttctatgactctgtttccgaagtcgcgtttgtctccatctttgtcattggtaaacagactgtaagcctcgtctatgaaaaggacccctcctttggctgcttcgatggcagcttcggttttttgttcggtctctcccaaccatttgccaaccaatttgctccggtcggtacgtatgacgtgacctttttcgagtaaccccattttgtggaaaatctcaccgatgaaatcggcaacggttgttttccctgttcccgggtttccagtaaagaccatgtgaaggggtggtatcgaggcttttaacccggctcttttgcgtgcggccaatagttttacatagttgagatgttcggcaatgctctgtttcagattgtttagcccgatcatctcttgtaaagagttcatggcatctttttcttttgtcgggtctatctcttttttttctccgatcggggggcgtgtctgtatgttgaatagattatattctccttcttcttcgttcccaatgcgaaacggagcattcaatactttttctcctaagaaatagatctcgacggcatattctccgttttcataatccgagaagtcgacgggttcttggaatgtccatagccggtttctttcttcgtcgtcttgtgaaatgaaagttccgaccgtttcgtatttggttaatccggtttgagtacggatttttatttcatattcatacgatttgtccgtgtcttttagtttgcttatcccgcagaatccgatataatagttgctatgtatactagggtttatacttgtgtaggagatgataggacggtctgggtcgggagcgatgctttcgtttttgaacaatagataattgtttacctcgaaacattcgtcgtatttttggggcaaagatataaaagtcgcacttttggttgtatattcttctttgtcggagagtcgggataggcagtaaatccatgagccttctctgttttctctttcaggaagagcgaaatatgccgatggactggcgtagttttcggtgtcgatcggcatggaaatttgagtttctatgtaggagcttccatcgggggcaattagttctgctaaaaaagtttcgtcccaagcatctattgtagcagattcgttttgtcctatgcattctgtcgaaatgaatagatattctccttcatcaacactgaattgtgtgcgtagtgaatctctgggtatttgttcttttgtgtcgcatatggagaaaaaagtatttttaaagatgatatgatggctggtattagacggggaattatcgctttcttcttcatcttccgtctcctcttctgataattgactttgaataaactcgtcgagtaaacgatcaaattcgtcgtccggtaaatcattgtcgttttcggcttgcaattcactattggataatgaatccaatacagattcggtttcgtcgatattatctttgatagattgtagcagctcttcgaggcgtgctatttttttgtccttttcgtccatagatcgggtgttttccggtatgagtttgtggggcgaagatagttatttgtcattaaagaggcaaatcggtagttatcgaataaattctatcagtttgtattttgcctcccatgtaattaaaaacgggataaattttcaaattttatcccgtttttaatgtgcgtgcttggctatgaaaatttttagaaaatttctgtaacgatacgaatgtcgcttcggtcggtaaattgtaaagtgaaccagatcttcccggcatcgtttactttttctatggaaaccgtgcaagcctcgtattgtatgggtgtattgtcattgtcacgggtagccatgattccgttgttcaaaatccctttttgggaaaaatcgccttgtgcagaaaatcgtaaaagtttccctgtttcgacataagtaaatccataggagcgtaccgatttgtcggtcggagagccagttatatccatgccgggctcgcagctcacttggagtcctgccgtttcttccgttttgacggtcgagccggatatccatgattctattcggggcgtggagtcgatagtaaagcccatttgataggagtttgccgaaatggtaaacgagtagttgtggctttctcctgagtcgaggataacggttagagtcgctttcccttctttaatagctgtcactgtgagtatttttcccgacaattcataagaaatcgcggagttattggtcgttatggtataacttgtcgagttgggtagcttgatagataccgactcgtctacccgtaaaataaagtcggttggttgactctcgttcttatcgtctttacaggctgaaaagaaaaggagggctgttgcgattgttaggatataacggatatatttagcagcattcatgattgatagtaatttttattctatgatttgtacacgcatttttcctgttccgtaagtagtcgtgaattgtattgtgtgaagccctgcggacaattcggaaggagtgaggtgtgtggccggttttccgtccacagtccattgtgtatccaagttcatgtttagcatcaggcgcactggttcgtcgcttttcttgtaggtcgattttatgtcgatgattctcaaataggaggcatcggacaagagtacagttccagaaatggttatgtctacgggggcagataattcgtcgctcgataatcggagtgtcacattgcgagtcccgatcgaccggggagaaaaggttatggcgaggttgattccggtcgtgtttaattcatgagctggcagattggacattcccaaagaaaaatctcccgaatcgttattcaatagttttgctgtaatatctgttgtcagatttttccctttgatgtatgtctctttatctttcgatgtttcggttccgatgtatccgaattcaattttgtcgttcgatatgctgatacttggggcggaggtggattgtcccgaaaaactgaattcataatttgtcgagtcgccccagatatactctaccatattgggatagtctatgaaaggatttctgtttccttgaaaactatatacggcgttgttgcggtctatttctttttgactgacagggtcttgtcgatgccatttcagtaatagggactggccataggcattcagtgtggggtaactgttttgagcgaacatggatagggcagaagatttccatgaatagtcttgatagcaggtcacgaagtataaatacatgcgggcgaagtcgcctttgtattcgtctgcgggttcaaacaggttggttgctctaccgttggcttgtccggttcccactttggtgactccattgtcgaacgaaggagaatcgaccacacccaatggataattgcttttggccatgttggcatcggcatcggaaggtgtcaggtggtgtaaatcgtaggaaccgtcgtatttaaatcgggtgagagcgttggttccgttgtaattggcggcatctccccaccaacttttgggtacgctgtgctcgatgttcatgcctttcgttgctccgctcgaaaaactataagaattgttggaatacatatcccatacttttccgttggggcggacatcgctttttttaaagaccgtccatgtacatgctattctgttgtaatcgtaagacccatagggaagccgggtatggtttttcagaagattatgtagctctgtttttagttcagcgccgtttttcccttccagagagttgggataatagtctcggggcatatcggccagcaaagagaaaatagaaccgcatatagcggtgaaaatcattacatatcgtttattcatgctgctttaataaaaaggggttcaaaggtaatcagaaacaatggaacagccaagtcttttatttgttttaggttttcttattgtttggcactctttcttttcgatatatattgtcgatattatctctatttttggctttttcccacataaatattgccgcaaaagtgatacctttgtagcctatacgtacattggaaaacgatattttaatggagaagaataatacacaaaagggaatcgttcaattcgctatggaagcgggagcctatatggggctctatttcgtggtgaaatttatatttgctgtgttgagtttgaattatcctttttgtaatgtcgtttctactataatgttgctattcgtcccgttggtagttttcttcatgatgcgtaggttcagtaatcaaaatgaaggaggtagctacttctctcaattgtggatgatgggtattttgcttttcttttttgcctcgcttatcagtggtttggcacagtatatttattatgtttatatcaatccagaatatataaaatctcagctttcggctgctgtaactttgttggaatcattaaatatgacaagtgacccttcattgttggaggctgtaaaaaccggtttggaacaggggaatattccgtctcctatggcagtcgttattcagcaaatgtgggtgaatgtattttttggttctttattgtcggcagtaatggcatggctcgtttctgtttggtttaagtcaagtaaaacaaagaaataggaatatggatatttcggtaatagtccctttatataatgaggcggagtcacttcctgaattgactgcgtggatcgagcgggtaatggaggaaaacaagttctcgtatgaaatttggtttattaacgatgggagtaccgatgactcttggcaagtgattgagtcgttgcgagaaaaaaattctcgtgttaagggtgtgaaattccggcggaactatggcaaatctccggcactttataccggatttcaaagagccgaaggcgatgtcgttattactatggatgccgatttgcaagacagccccgatgaaatccccgaattgtatcgtatgattgcggtcgaggggtatgacctcgtttcgggctggaagaaaaagcgttacgatccgttatccaagactatacccactaaattgttcaatgcgacagctcgtaaagtgtctggcataaaaaatctgcacgattttaattgcggactgaaagcgtataaaaaagaggtgataaaaaatatagaggtttatggcgatatgcatcgttatattccttacttggctaagaatgccggatataataagattggggagaaggctgtccatcatcaggctcgcaaatacggtaagacgaaattcggattggatcgttttgtaaacgggtatctcgatttaattacgctatggtttttttctcgtttcggggtaaaacctatgcattttttcgggctgttgggtagtttgatgttctttttaggacttatttctgtcattgttgtgggggcgaataagttatattgtttatataatggtttaccatatcggctggtaaccgattctccttatttctatttggcgttgacagctatgattttgggtactcaattgtttcttgccggttttttgggggaacttatatctcgaaattcgagtgaaagaaataattatcagatagaaaccgaatttaagtaattaacgtaagtcttgaatttatgagcggtttgaaaggaaacgaatgttccgatttgcttacactggcgaaggctaggggttcggtgcgatcttttaagtctttgaaggtcgagcgggctaaactcgaatatattttggaggtggctagactggctccgtcggctgtgaattttcaaccgtgggcttttgtcgtggttcgtgacccggaaaagctaaaagctttgtacgattgttatccacgtgaatggttcgcatcggctccgatgtgtatagttgtttgcggagaccatagtacgtcgtggaagcgtttgtccgataatagggatttttgtgatgtcgatatagcgatagcaaccgaacatttagttttggctgctgccgaacaagggttaggttcttgttgggtttgtaattttgacgtgcagcgatgtaaaaagattttgaatttgcccgatttatgggaacctatggttcttttgccgttgggctatcctgccgagggtgtggagacggagagaaagaggaaaccatttaatgatgtggtaagatgggaagacttttgagttttatcgaaggagttctatttttatgtgcgtattgcttagttttaagtaactgtggcagtaacggttgtgtggataatcgtagtagtattcctttggctcaattttattcttatgatgcacaagagacggctttgtctgtcgattccatttcaattttcggtataggacagccaaccgattctatgttactcgattcggcggttgccgtaacacaagtttatcttccgttgcggtttacacaagactcgacgcaatatgtcattcattacgaacagcaaggtctttcgtctcctcgttataacgatacgctcacatttgtttatcggtcgtatccctatttcgtgtcgatcgattgcggggcgatgtataattttgttatcgatacgtgtcggtatacacgtaatatacttgactctgtttctgtgacagtcccggagatcacgaataaaaatgtggagagtatacggattttttatacagttcaaacccagaccccagatgaggagtaaaattttcatattgtttttaggggtaatctttgcgtcggttgcgcaacgacgggtcacacctgtcgatccaacagcgaaaagagaaattgtaccggtgcaaacggatagtgtcgttgcggagccggaagagccagaaataaaggggtatctttatcccttgtttaatggtctctccgtaaatgtcaacattcttgacgggatcgcaaatttattcggacaaagttatggcaattatgaaatagcggcagaattggatttgcataatcgttttttcccagtatgggaaatcgggatcggacatgccgataatactcccgaggggttgaactttacatacaggaataaagcttctctttataatcgtgtaggaatgaactacaatttcggatataataaaactgcaatgagttttttctatatcggtattcggtatggcttttctttttttacgtatgatatagataatattttagtagagtcaccttattggggagaatctgaaaaactacaaattaccggacagaaatcatgggctcactggggtgagttgttgggagggcttcgggtgcaagtgtataaaaatttttatatggggtggactgttcgttatcgattgatgttcagccataaaaagaatacttattctcaaccgtggtatataccgggatttggaacggacagttctccgtttggatttacttatacggtaggttatcgattttctttcggaaaaaaagaaaagaaaatagagtctcaaccagttgcagaatgacgatatgggtatgttggaatcaatagagaagatattgcacgatgttgccgatctattttctgccaatacggaagcagggcataatgtggtttatgtaatcttgatcgttttgatagccattttgtgcgatgcgctttgtaagttgctaataaatagattgctacttccaatcattcgccgtacaaaatttgaatgggacgatcatttatatgacaagaaggtggtgtcgaggctggctgcattggctcccgcttttattctatatgcatttttgccttcggcgtttgatatagagagtagttggtatatacttaccgatcgtatatgcaaggtttatatcatagctcttattcttcgattcttgaatggtgtgctgaatgcatttctcgatatttttaatgaaaaggaaaacttacgccattatcccataaaaggcggtgtgcagaccatacaggttatcttattttcaattggttttatcagcataataggaacaattatagatcaatctcctgctcgtttgtttgccggattgggtgcatctgctgcgattctcatgctgatttttagggatacgatattggggtttgtagccggaatacagctttcggcaaataatatgttacataaaggagattggataacggctccggcatataatgctaacggtatcgtacaagatgtgactctcaatacagtaaaagttttgaattttgataatacgacgaccactattccgccatacgctttggtgacaggctcttttaccaattggcgaagtatgtttgaaggaggggggcgtcgtatctcccggcagatacttttggatataaatagtatttcttttctccgtgaagaggatttacttcgatttaaggatcattttttgatcggtgagttcgttgttcagcggttacactctattcaacaggcttgtaactctggaaattcttttttggcagaggaacttagggttacgaatagtatgttgttcagagtttatttggaaaactatatacgtcaaatgggaaaatccaatcccgatatgctttatatggtacgttatctgcctatggcggagcgaggactgccagtagaactttacttgttctctgcggagaaaacatggaagatgtatgaggccgttgtagcagatttgatcgaccataccatagccgtgacagccgagtttgggttgcgtttgtatcaatcaccgggaagttatgatatacaatgccttcgggaaagagtaaatcaaatataggaaaaatgagaaattctagacgatatgtttttataattacttgtaatgtagaaagttatttttatttacagtttataggttaatatttatgaatgattgtttgtgcatattaattcatagaaaaaaattaaatgataattagggtgtattcttattcctgcttatatttattccgtagattaaaagagctttggtagatatttttatagtgctatgatttctaaatatataataagggctttgtataagaaatattcaaaacctccgcgaaatttttccgagttgaatatcgatgaatttgtatctatttgcggcgattcatacggtattaccgtcgacgatgtgtctatgacattcggccagatgagtgaagataatccgtttcgtaccattttgttgcgtaatatatacggtatagagaaattcgaatatcacatggcgttggtttcttcatcatacattctgttttttagtcgagaaagttgtgatgtaactgttcattttaagccggaatcaacctcctggctgaaacgtttttgctggtgggttaaattccggcttttacatctaaattaattagtaaataacgggttcttttttggccgtttcatttttccatttctgggcatattcttccagtgtatgtccgataattgtcccgatttttcgataattcatttcatcgagatttgctaacgatactcgtatagaccatcgaggtccatcgaatccatcaccgttcagaacgactacaccggcttctttggctaatctaatgacaaagtcgagtggttcgtaatttttttcgagatactcggcaaagtcttttccatataattgggttgcccataccataatatcgatttcggaatagtacccggcccgcaagctatcgggaagtaatttgaacccggtcttttcccacatggccgtcagtctattggttatcatcttctgcaatttgtttttgtatctgtcttgcatatcgcaaagagagaagagagcgaagagtgacatttgtatttgttgaggtgtggataaccctgccgtgtggttaagtgctaccaacctactgtcggcgaccaatcgatcgataaataaaatcttgtcgggattgaggttgatactatcgtatctgtcgtgtagttcttttcgttgtttttcgggaagaagcgctatttgagcgtcgaatacgttgtggcgggcaatagcgatagtcgctaatctccaaccggtggccccgaaatattttgagaaagaatatacacaagccgtgttatagggcagttcatacataagagaacggaaatggggcacgaatgtaccatatacatcgtcggttataatcatgaggttgggattgttttcccgtacgatttttattattctcttgtgggtcgcttcatctaaactgtatgagggaggattgctcgggttgaccaaacagagcagttttatagaagggtcttttagcttatctaattcattttcgggatattgccaagtatgatagccttcttttgtcagttgagaggcttgtatattgactacgtcgaaattaaattcttttagttggggaatttcgatataaggcgtaaagataggagtcatgagagctatgcggtcaccttgtgataacagtttatttgctttcagcgaattgaaaagatagcacatagcagcggttccaccttctgtcgcgaaaagatcgtagtggtcgggaggtgtttgtcggtcgcacatttcttgtattaaatacttttcaacgatcaattcggtgtatttgagtatacggtctgggtcgggatattggtcgcctatgatgccatcgacccattcatgaatcagatcatcggcatttatgccttctttcgtgagaaactgaacactttcgttcaacaaatgtgcagccggtgttttttcgtgatgtttgagaaaattttcaaaccgtttggctatttcttctttttgaggcattccggcgataccttcttcgggaagttcaaatgtgagttttgcttcttcgacagcaaaagtacctaagaggaaaaaagcctccctagctactgtgtttatccaattaggatttccacgacctgcatttaagaattggcagacggctttctggtcgcactctttggcataggaaattagatcgttttttatttcgaagggactcatctgttccagtccttgttcgaatcttttgccgtaatcggccatggcacgaggcagtttttcttgacttttcataattgttacgagtatttgtttatatatatgtcttttgtttatgcagagagaaggactaagacgacgccccctaaaatgagcagagtattaccgatagcataagttaccgtgtatcccatagccggtaacgtgcttccaagactttcttggatagctcccaacgccgcagttgtggtacgggctcccgcgcagcagcctaaatttatagctggtcggaatttgaatactttcgcaccgataagcaatcctaataataacggtattgtagtggctaaaactccggcaatgaatagcatgaaacctgcttcacggattccggataggaacgtggggcctgcggttattcctataacagcgatgaacatattcaaacctaagttattgaatatccaaactgctggttcgggaactcgtccgaaggtcgggtgtttggttcgtaaccaaccgaagaataatccagagagtagagctccgccacttgtactcaaactgataggaacaccacctaaatgaatggttagagctccaatgataccgccgatgaggataccgagacctacgaatatcatatcggttttattggtaggccggtcgacatatcctaaggtgggggctgtttcgcttatttctcgttttagccctacgatttccagtgtgtcgcctttatacaatacagttttcggatagaccggtatttctacgcccgaacgctttatctgtttgataatgattccgtgcatacagggtaacgaacggagatgacgaactgtttttttatgaagttctttgttggtaagtagtacgaaaatatcttccacggggaagtccaatagttctggatcgaaaatctccggccctatccagctttcgtcttctatgatggtttcccgtcgtccgcttaaaaccacttcatcgccttgtttaagaactgtttttggggttatgtcgaggacttctccatcgattcggacacgttcgacgaagactcttcttcccatctccttaatatgtttttctatttcttttaccgtttgtggagttttgaaccagtccgattctattttgtaggccctgaatacaaccggtcggttggcattcatgagtgccggatcgttttcttcgttgtcttgtttcagttctttttcaagtgcccgggtatcgttttttactttttcgagtccaccgagtaaccgaggaccgagtgtacctaagatgtaagccgagcctatggttccgaaaatgtaagtgacggcatagcaaaccggtatgatattcaaccattcttgttgtttttctgctgaaattccaagagtaccgatggtgtctgttccaactccgatggctgccgatatggtttgtgctccggcaaacagacctatggtcatacctgcattataacccatgattttggcaattaagtaggtagagcctatacagacaatgccaaatatacaagcgaatataacttgatggattccgtcgctgcgtaaggattggaaaaattgaggacctacgctatatccgatagcaaataggaatagcaggaaaaataccgatttgagtggaccgggaatatcgatgttcatttgtcctaccaatacacctactaataaaaccgaagtgacggttcccaaagagaagtttttgtatttgagacttcctatccaaaaaccgatacccagagtgagaaaaatcgccatctcgggatagctgcggaaaaaatgaatgattatatccatatagtttttaaaattaaattaggctttgttatgtggggtatttttatttatatggatataacaagtttcggtgtggattgttttattgtcggaatatgattataatggttcagtagaaaatctgtgagggagtcctaaatttcaacgatgaattttttggcaataaccacgtttcagtcacttcgatgagaagtcgggaatgctgtcataggattttgtagagtttaatctattcgtcataagtgtttaacccctccgtcctacggacccctccccttattttgtttgacaacaaaacacagaggcggagatttaaaatatatcttcgatagtgatttataaattccctgctgattttccactgagtcgattatatttgtagaataattaaattatgaagcgatggttaagataatggagataagattaccgcattacgggagagggtatcatttgataacccaagagcttttgtctcgtctccctcagttgccggaaaacggcttgctgaacctttttatcaagcatacttcggctgcattgacaatcaatgagaatgccgatcccgacgtccgtttggactttgcagccttcttcgaccgaatcgtgcctgatggggcttcttattttaaacatatatacgaaggagacgacgatatgtcggcacatatcaaagcatctttattgggagcttctttgactattccgataagaggccgagcccttgatttgggtacgtggcagggtatctatttgtgtgagttccgtaacggcggaggtgctcgtcgtgtcaccgttacgattgtagaataaaaaacgaggagaatacgaataccgtattctcctcgtttttattgaattgtcgttttttgttacatattgttgtattcgtcgtccatattcagatcggcaaatccttcttcgtcgagttccgagggatcgaaggtttcatctccgtaaaaggtttcatcgaagtcggaagaattattcgcggcattctttttttctagttcttcgaaatccatcgtttgttggggaggattgccttccttacgtgtgcagaccggagtctctaaatcttttcccggttcgatctctttcaattccataaaaaacatgcggtcggtcatgtaatcgaatacaaaaactaatcgttggccttcgtcttcgatgaggtcgcttagttttgtagacgccatgatccacgtatcttcgtcagaatctttccccatgtccatcagggtaatttctgtttttttctcccaatcgtcatcacaaatgaagaatgaggtcatttgatccttagaaaagccgacagaatcgagtatggcatcgtgcagttcgagaaaagaagcatcggaatcgatgcatatttcccgtttgaaattgtcgacttcgtctgaaacaattctgaatttatatatcataatttttttgtaattaggttctttttttcggtatgtaaaagtactaaaaatctttctcctgccaaataaaggctataaaatttcatgattataatcgatattcagggaataacttgcggataagtataaaaggtcgttgttatttgaggtttgcatttagtcctcaaaaaaaggacgaggcatatctttctgatatgcctcgtgtatgatgggaaattagaggggtgtctttttatatttctaacccctctcctcagaaactatcgtttcttcggtgtctcccctataccattcgcagcaccccgtaatgctacgggacacggcagaggagaaggggggatacatctcaccctcctcctctgtgttttgttgtcaaacaaaatatagaggaggtggcacgtagtaacggaggggttaactcatttcgtatattagaaattccagccgacgcgtaacgacggagtcgcatggaatccgaatctgctttgtaaattagaagtagtaccgtctgtttcggtggtcgtcgaccctgagacagttgtggtagttcctcttttgtagttcatagagtcgtaacccaatccgagttcgaatcctaaatacaggcctttgcacagataaacatctacaccggtaaatacatttacgccaaatcccagaccgggacgtttggtctctgttttatcgtcgttttcggtgttgtcggtttttgttttagcggtagaagtcaataggccaatttcaccgccaacatatggagagattctttcgtatttggtgaagtgatactcaaaaccgggcataatcgaaaatgtagtgatagattctttgctgtttctttcgtactctttttggtctgtcgggctttcgtaataggtgacatctttatcggtagatgtgtttaatcccagtttcaagcgaacagccattttttcgtttaaatgcaaacgaactttggcgccgtagtcgggtaatgaaaattgtccgtcagtagtagctccgccgggcgagtagttcaattctgtcgagaaactcatgttttcgggtttgtacttgttttgtgcgtttacactagtcagtactacggctgccatagctgccactaagaaaatttttttcataacattgcttgttttgtttttcctactcttttaatggttttcggaaattccattaataatataattgcaaatatatttaatagattctaattctaaaatattttatttaaaataatgcaataaaattatatattatagtatgtatgagtttgggaacttttttaacaaatcgcaaacataacttacattataatataagtaacgggcttatacaacagactacatcgtatgaattgagtatggttgttcccgaaaccggaggattgggattgaggttgagcttttaacatggagaaaataagaaagagccggtacatcacgtatcggccctttcacctctgatataaattggtagatattattatagatatcctttaatgataccccgttttgaattgcggacgaacaatacgatttcgtcccgttctttggttgcgggtagttctgcctcgatacgttctatcgcgtcgctattattcatgtcggatagatataagtaacgatagatttcttggatattgcaaatggtttcgttgctgaaattgcgccgacggagcccgatggagtttattccggcgtaggatatgggattgcggccggctttgatgtagggcggtatatctttgttgatgagagaacctccttgtaccatcacatgtgcgccgatgtggctgaactgatgaatgaggctcccgccgccaatcacagcgtagttgtcgataattacttctccggccacttgcgtagcgttggatataatgacgttatctccgacaacgcagtcgtgagcgatgtgtgagtaagccataatcaaacagttgcttcccactatggtttttcctttggctgcggttccccggtttacggtgacacattcgcgcagtgtcgtattgtcgcctatttccacggtcgtgtcttctccttgaaatttcaagtcctgaggaatcgccgagataaccgctcccgggaatattttgcagtttttgccaatacgcgcaccttccagaatagtaacgttggaacctatttgtgttccttcgccgatgattacatttttgtctatggttacgaatggttcgattactacgttattcgcaatctttgcgtcgggatgaacgtatgctaacggttgtttcatttatttgctttttagatttatttattcttgataatctgtgccatgaattcggcctcagtgacaatgcgctcgcctacaaaagcatatcctttcatataggcgcatccccgacgcacttcggtcatcagtgataagtggaatatgacggtatctcccggtacgactttctggcggaatttgacattgtctattttcatgaaataggtcgaatagcgttccggttcgtcgacggtgcttaataccagcaaacctccggtttgagccatagcttcgaccaaaagaacacccggcataacgggttcggcagggaaatgcccttgaaagaaaggttcgttacccgaaacgttctttatacccacgatgtggcgtgtccccatttcgataattttatcgaccaataggaagggatagcggtgggggagcaactgacggatacgattgacgtccataagcggctctttattgggattgtaggcgggacattgaatgtcttggcgacggacttctttgcgaatgagccgagcgaattgattgttgattttatgcccgggtcgagtggcgatgatacgaccttttatgggtttaccaaccagtgctatatcccctaaaatgtcgaggagtttatgacgggccggttcgttctcgaattcgagcggtttgttgttgatgtaccccaattcatcgacgtgtttgtgaggaacgtttaaaaggtcggcaagcctgtcgagttcggtttgtgaggttttttgatcgtagataacgattgcattgtccaaatctcctcctttgatgagattattttttaccagcggttctacttctcgtacgaaaacgaatgtgcgagccccggcaatttcttttttgaaatcgtgcaggtcgtcgagactggcgaattgattgttcaagataggagagtcgaatgagatgagcgtgttgatactaaactcatcgtctggtaatactacgattgaagaaccggtttcttcgtcgtggatttcgatttttgatttgataagataatattcccgttcggcattttgttcttcgagtccacagcgctctatttcttcggcgtaaacagcggcactgccatcgagaatgggcatttcgggtgcatttacctgaatgagacagttgtctatttctgctgcatacaaagcagccatcgcatgctcgatcgtgcttattcttacatctccgtcggctatgaccgttcctctgcttgtttctactacgttttcggctaatgcctcgatgaccggttgtccttcgaggtcgacgcgttgtattttgtatccgtgattttcgggggccggtaggaacgtggccgtaatattcaatccggtatgtaatcctttaccgctgaccgaaaagctgttttttagagtcttttgtttcatcgatattatagtttatttatttttcaattgttcttttaatgcttctatctccctttcgagagctttcaccgtacgggtaagttcgggaagccgttttacataaacgacttgtctggcaaattctttggaaggaacagcagggtatcccatgattacagcgtcgttctcgacatgattgggtatacccgattgggctccgacttgaattcggtctcccagtttgatatgcccggcgactcctacttgaccgcctatcatagcgtggctgccgacttttgccgaaccggcaattcccgcttgggccgcaataaccgtgtgttctcctacttcgacgttatgtgcgatttgtatcaggttgtcgagtttcacaccttttttgataatcgtagaacccattgtagctcggtctattgttgtattggctccgatctcgacgttgtcttcgagtacgacgtttcctatttgagcgattttcgcatattccccgttggcttggggtgcgaatccgaatccgtcggctccgataacggttcctgcatgtagaatacaattgttgccgatgacacagctgtgatagatttttactcctgcaaaaatggtaacgttatcgccgataactacatcattcccgatataggtttgaggatagatttttacgtttttacctatttttactcgctctccgatataggcgaacgctcctaaatagatatcgtcggggagtgtgaccgacgaggagacatagttgggttgttcaataccacgtttggcgatagtcgcttcatttaccaaattgagaagcatcgctaaacaggcatatgggtcatcgactttgataagagtggcttcgataggatgctccggctcaaagtctttatgtaccagaactatgctggcgtgagtttggtatatatagtgcgtgtatttgggattggcaaggaaagagagagtaccgggtgttccttcttcaattttagacaggttattgacttctaccgagggatttccaaccaactctccatgcaggaattctgctatttgtcgtgctgagaatttcatattgttctctgtcttttgagtttacaatcggcaaatttcgcaatttttttcaaattcttggtaataagaagtagattttattacaaaaggattgctccttgcgatttcatctcattttataaatctgatttttaatggtataaaaattttctgtttgtgaagctaagatttattcttaaaaaagaaggtgataaaaagtttgcatctgtaagaaaaattcgtttcgatagatacttttttaagtgaaaaatgatttcctttcggatatttatgttatctttgcaacctgcattttcaaggtatatcgtgactagaaatagtgcagatagtttataacaaatacacattcagcataaactatgaaattgatgcaagaaaaactgtcgaagtatgatgctccgcagaaggccaaagcccttggtgtttatccctattttcgtaaaatagaaagcgatcaggacaccgaggtcttaatcaacggcaaaaaagttttaatgttcggttcgaacagttatttaggtcttaccaatcacccaaaaattaaagaggctgctattgccgctatccgtaaatatggtacgggttgtgccggttcccgattcttgaatggaacattggacattcatgaggagttggaacatcggttggctaagttcgtagggaaagaagaagccattatttattcaactggatttcaagtcaatttgggggtagtctcttgtgtcactggacgcggagactatattttatgggacgaactcgatcatgcttcgataatcgaaggtcgccgtttgtctttctctactccggtgaaatatcgccataacgatatgcaatcgttggaggaccagttgcgtaattgcaatcctgataaggtgaaattgatagtgaccgatggcgtgttttctatggaaggcgatgtggccaatcttcctgagatcgtacgtctggctaagcagtataatgcagcggtgatggtcgatgaagcacatggtataggtgttttcggacgagacggacgtggaacatgcgaccattttggtgtgaccgatgatgtggatctcattatgggtacattcagtaaatcattcgcttcgttgggcggttttatcgctacggataaggtaacggcaaattatttacgtcataactctcgttcctatattttcagtgcaagtattacaccggcttcgactgcggcggtgggtgctgctttggatattatggagagtgaaccggaacgtatagccaacttgtgggacgtgacgaattatgctttggaaggattcagacgtataggttgtgagatagggaatacatgtacgcctattattccgttgtttattcgtgataatgagaaaacattccgggtaactcgcgatttgtttgatgagggtatttttgtcaatccggttgtttctccggctgttgcgcctaaggatacgttgataagattttctctgatggctacgcatacacgagcacaagtagatgtggctcttgaaaaaatcgaaaagtgtttcaagcacttggatattatcaaataagtatataagtatagtttgtttttaataccgttggagaggaactctccaacggtatttttttaggcagtagagttttatttgaggtatttaagaaacttacccaccttattttaataaggtgggtaagttaaaatcggttgagactaacgtattagtcatctatgtcgattaggttgaaatttaaatcgaatgtaagctctaatcgattcgtaagtttcacttcataatctcttttgtccctatcgatttgtacaatttgtgtatctggatagttttgggatacatagcttgcaatttgtgcaggaatgatagctgttggcactgtcgaatatttacattcaacttctttccattcaccgtcttttaaaaattcgactttggaaccattggtgaaaacaacttcataacgggtttccagaaaatcccgttcgagttttgccaaagcgactttctctttcgggaaatgtgtcttgatgaacagctgtgctttttgaggtaattgggtaacagcaatgggtttgtcgttatcggcgcaagccgtagaaataccaagagccattagaattgttgtaagaatcattagctttttcataacattcaaaaattattagttagacattgttttaatttgatgatacaaagattaggagcaattttgaaatgaatttgaaattctgggatattatttgaaaaaaatcgtttttttagtttatggccaagtaatggagaaatagtgcttcgactctttgaactgatattctatatgcagattgtaatatcgacaaaccgcttttaccagggccaagcctaatccggtagaaccttcttttttgcttccctgataaaatctttcgaatatgtgttcggtgtccaaaggcgttgttccatcattggcaattgtcagggtacgattgataagagtgatttcgatattgctgttttgtgttgtatgtacatatgcatttttaagtaaattggtaattaatgtagaggccaaagactcattcattaaaacaatgaatgtttcaggaatgtttattgtataggaaatatttcgtgatgagtatatttcgttgtatagagagatttgttctttaattataaaagctaaatctatatttgtgctctcggggaattgtccgttttcaatttttgtaagtagtagtaacgttttattgagtcgaactatatgccccaatgttctttgcatcttaaatagctcttctatttgtgtttcattgagctctgtgttatcgagcagccattcgagacgattccctaaaatggctaagggagtttgtagttcatgagaggcattccctataaattgtttttgttgctcgaaaagttcttccgaacgatttgccgcttcttgtgctgcgacattgagcttgtgaaattctgaaatattcgtgtcattgggtactggtgcattgtgtctgcccggagtgtaattgtcgagccagtgtaatagtgcatacagcgggcgcatgctgcggtggaaaatccatattgtcgatcctattatcgttatgagaagtacgaagtagaggagtatgatccaaaataaaatagtcctgaccaaatcgtctttttcgaaagtcggtatggcgactttcagttcatagtaattatcatcattatctaagaaaatggtggagaggatgcgtgctggttctgtctcttctttttctggaatgtagacttcggcatcgtaatattcgatatggggttttgatgaagcataggcttcgtcaatgggtgttatggaataactattattagatccactatttaaggaaggcaattctctgccggcaagcatgcgtataattatcaattcggaataatcttccagcgtatcatcggcctcgtcgttgatttcttctaccatcataaaatagaagagagtcgcccaaagtgccatgagcggaatcaaaattaaagataaacgtaaagctatacggtatatgagtttcatgagacggtgattttattcgattggcggaacgagtttgtatccaaatccatatatggcttttatttctatgttggctcctgcatcaataagtttgcgacgtaaatttttcatttgagcatatacaaaatgaaaattgtctgcttggtctgcatggtctccccatacggcttcggcaaggacagatttatctactaagtgattagggcgttgcatgaaatagaatagaatgtcgaattctttttttaataaggataattctttgttattgaccaacacccgggagctctcgggttcaagggatacattccctaagatcaatgccatttctccaccgctttttcctcgccgtagcacactttttatacgggctaagagttcggctgtatgaaatggtttagggaggtagtcatcggctcccatatccaatccgagaattttgtcatcaagggaatcacgagcggatatgataatgatgttttctctttttcgtaactctttcaggtgttttagtagttgtagcccattcccgtcgggcaacatgatatcgagtaaaatacagtcgtaactataagctgcgattttagcatctgcttcggaataagtgctggcagtttcgactacatagcgctcctgtactagcgctcgttgcataatttcccgtaaggagggttcgtcttctatgataagtattttcatgtatcaaatttatatattcaattttgtagagaatttaaaatgataaaaaattgtattggggaaaaggaacgtaaagtaaatagacttaattattttacttcctttttggaataaataaaaaggaatctacattttatgtagattccccatatgagagcaagaagtggattattctgttacttcttcaaatgcgtctttcccaagtccgcaaactggacatacccaatcatctggaatatcttcaaatggagtacccggagctatacctccatcaggatcacctactgctgggtcataaacccattcacaagctgtgcaaatgtactttttcatacaaaatttttttaataaaacatatttggggtataaatcagaaatatactaattctaccgaaagtaaaaataggtataattcgtttagaaaccaaattatccagagtttctttttataaccatttcaattttctaacaaaagaagaatacttttgttttgtatcgaggggaggatattgttcaaaccaatccgtgcaaggtctattttttatagattcgcgatacctgtcaaatctcgaaatagctatcttttgttgaaaaagaaaaacctcaaaagattaatacataatcttttgaggttttattccttgttgtagcgaatctttttttttattcatttttttacttaaataaccactgtggagctgttgatagaagccttttgtcatatttttgactcgttctcggctcgatctatgtttctttcggccataagaatttttatagttctttctttttctgccaaaagctcttttaacatttttacctctccctgtgtgatatttacgttagcatttccaaagagtgtagtcgcgcttatgtcgcttacatgattgccgtgagtatcatcgaagaagtaggatgcggagattcctatcgccttacatattttatccaaaagctcacagtcgattgaatttttacggacgattgccgatagataggttggagtgattccaacttcttttgcgatatctttccgaacgattctgcgttcagtcatgattcgattcaattcaggtcctatatttttcataataaaacaaattgttaattatgtataaataattagttttataatcaaacaaataatgtattaaatcaatctatttgtatatttgggtttataaatataataactattttctaaatacaaaaatttatggaaaaacgaacaaaagattctatcgccttatccgaatttctttccacattctcttctaatgaatgtacggttgctatcgataaaatagttgaaggttgtttagtccctcgtcgtacagtgtataattggaaatacggtgtatgtcggattcctgaattatacaagctcaaaattgaagaaattttcggccaacagatattctcgaggcctctaatttgtgaaaaatgacatggacgaactattcactgtctccatcgaatttttcatctttaacgatgaactatggtatagaagtgagggcaaatcaccgtgccggttaaaggaacaagactacgaatttgtgaccttaattgcgaatctgattgaaaagttctatccaaaagcatatatcgctttggcctctgaatatgccaagagcaaggctaatcttccacttttccgatatcggattgtctctagattttgtcgctgcaactttggcaacatagacaacatcatagacatcgatgcctctaccttccattttgaacatgttctttgtcctctccggggagaatgcaaatttgaaaatattgtatgtcaccctgaatttgagagccacatctcgaaagccgagaagagaatcctggaaagatggtatcgtggagagtcgaaagaagaaatagccgatgctctgtttttgtctatacacacgataaacaatcatattcgaaacgccttccagcggctggatattcacaataaagccgaattcgtaaggttcgcagacttaaataatctattcaaatgaaaaaatacaacaaattcgatattgatagggtgaaatcggcggcagatattcgcgactttataccaggactttctgggcgcggagcaacccaatattgcgagtgccccgagtgccataagtcgggacggaacaaggggctttgtgtcacgcataaaaccaatatggatattgcgaaatgcttctcgtgcgggttcactataaatggagctatcgatgccgttcaatattatgataaggttgagttcatagacgccctgcaaattgttgcctcgagatacaatatccttctcgaaacagagatggagaaacggcagcgggctatcgaccgaagccgagagaaagtaaagcagtcgttttgtctctctcaactggaagccagtggtcttacggtgaaagatgtcaccgcaaaagttcgcctcgacgataagagtggggaaatctatctgccggcattccagcgaggcggtatggataagtatttcaacatcaataagaacgatgatgaaatgctcatttactattatgacctttgggggaatcctgttcaatatgccacgcgaggggccgccggcagtctcaaaccatacgtcaggatccggtggtcgaatccatcgttacatctcgataaagatggccgggagataaagtaccaaacacccaagggggccccgaccaagttttacattcctcagtacattagagagcgattcctctccgagacgcatatagagacgctcatcgtccaggaaggggagaaaaaagccgaaaaggcatgcaaacatggtatcgcttctatcggcattcaaggaatttacaatatcgggaatgccgagacagggctaatccaggatcttcagtacctggtccaaaaatgcacgataaagaatgtcgttctgttgatggatagcgactgggatcacctccaccgcgagattcagataggtgaccatgtcgaccagcggccgaatcagttcgccaaggccgtcatcaaattcaagcagtacgttcagacaatgcacaatatcggggtgtcggttgacatcttcttcggtcatatcaatgacacaccctcacacgacaaaggcatcgacgatttactttgcaataccctcaaagggagagaggaggtccttcggaaggagatagacaccgttatgcacacccatgacggtaaaggccaatttcttgacatacataaaatcacatcgaaaaccgatttccaaatcaaggacttttggctgttgaacgatagagatggattttttgagcgtcataaggaggagctcttgcaaatccctaatttccgttttgccaagataaattaccgaattgaggacggtaaacttgtccaggcatcgcgctattcgagtgagagagacttctgggtcatcggggcaaatgataagggaaagaaaacggtcgatttcgattacatcgaagccttacagttcatttcagctaatggcttctaccgcattcatacttccgacttggaggtcgatcaatataagtttgttcgcatcgacgacggagtcgtccatctgtcagggccaatcgaaattcgcgatttcgtgtactattacgcgttacaaacttgtaaggatcgcgacgtaattacgatgttggcctcacggctcggttctcttctggggcctgataagctcgagcgaataacgaagatagacgataacttcgataatttcgagcctcatatccaaagaatgtattaccgcaacggacaaattcagattacctcgcgagggattgaatttggcgatctcctggggcaggtttggagcgacaaagtaatccggcgaaagttcaagcgggttcccgttattgataaaatcgaatatgacccggctgccggcttttccgttttcccgacagaagaggggaaagcctgtgagtttttccgattcatctgtaatacttccaatttttggaacataccaggacacacacctaccgaccaggaggagcgggaatttcagcagcatgtcgtcaacaagattacatctatcggctttctcatgtgcgactacaaatatcagaccgagttgaaggcggttatcgcgatggacggccagatgggagaggttgcccagtcaaacggacgaaccggtaagtcgctggttggagcggctctcgcaaaaatactcgatcagacagctatcgacgggcgaaataccaaaaacgacgacgattacatctactcgaacgtgacaccgagaacccgaaacatcttcatcgatgatgtcaaggtgaattttgatttcgagcgattcttctttgccgttaccggcgacctcgcagtaaatccaaagaccaaggctcggttcatcatacccaacgaaaaatcgcccaaattctacatcactacgaaccatgccataaatgcgaacaatcgctcggctctcgagcgcattacctatatggccttttccgactggtacaacgacaaccaccggcccatcgatgatttcggacaccaattctttgccgattgggacgaggaccagtggaatcttttcgataatttcatggccgagtgttgtatgttctatttcaaatccatggccgagagttggtatcgaacagggcaaggggcagttccgccgccgatgcgcgacatcaagatgagaaccctcaaacagcaaatgggcgaggccttcgttcagtgggcagagacctatttcgacgagtcggcgaacaatctgaatgaacgcataccgcgaaagaccatgtacgacgcttatcatagctctttccccgacagcaaattcggggttactccctccaatttccgcacgaaggttgtgctctattgtgattttaaaggatatcacttcaacgtttcgcggccgaacaaatccggcatctcgttccgcgattggatcgaagatcacccgggagaagcgtttgtcggagaggccgataagtcgggcggggtagagtatttcggcgtgtttagccttgattttgcaaagaaacaaccattttaattttaggatatgagtgtgaattttaatccctatgaaaactaccggattcgggtttttgaaaactccggcgaacttcggaattacaagaaagacgttgtcgttgacaatcgtcgagaacgtgtcgtacttcttatcgggcaggttgcgcccgataagtttgcgataggatacgatatcttcttcgccgatgggcggcgagccggacggctcccgtcgttggagttcgggtatttcgtctgggaacgagaggcgaagctctatttcttggggtatatcaagcaaaaccgttcgaggttcttgccctctactatcgaggcggtcgacgatttgatccgcacgatcattcagcccgggctgttctgattcgtaaaagaacgaacgattatatccagagcggacaaggcagacgagaggtattcagacgggtcggtgtatcgttgcaccgacccgttttatgcttttatgtcgggctctttttcccccacacccccttcgttgagaatgtatgggaaagtgctgcggtgcaaggaatatggtaaaacgctgaaaaatagcgcaaaagctatgtacgtatatatattcttttttttattttaatttgaatcttaataataatggaaaaacggtacattcgtacggtggttattttaccttttgatattcaatattttatggtcgtactttttttattttgaagcagtgcgaaactgtgcgtactgtgcaggagtacggcaaaaaaaacagtacgaaaaaagtacggtcatatcgctttggtattcagatggttgaacttctttcgtacttctgcactatttttttgtgatttttcatagaatacacatatagaaatattttaatccttttcgttcatttttctggttgtgtatttacagtttgtttgattatttatatatttgtgtattaaattattacgtcatgtctcaatactatgtttatattcatttggagaaatatcttgccgaatggttgcttcatcagtttggccaaaatggtcagatacgtttcccgagggggagtgccgaaaacgatattttggagtattcactgacgacgcagccagccgatatcccggttccgttgaaatctcccgattctttggcgattgagattccctattttaaaacgaaggaccctcggtattacaattttctaccaccccgagcgaagaaggctcttgagcggacgatttatattcgattccggattgagctttggaatgagctgcacaccttcgacagtctgtcccacaatctttctgacctcatttggacctttatggagaaacacgaaatcgccgacgatccgaaaagctgggaaaccattcgacagatgtattttcgaatgagaaaaacgtaccaaaaaaaacagcaaagaaacgctacgagttcaaaggaagaatttaacaatgcggtacaaaacgcacaataacaaatatttagcaatgaaacaaattttgccgggcattctccgattacaggttgtcgattgtagtctgcttccgcctaatgtctctttgaaaagcaaagcgaatttgcctatttctgtgttagcggacacaacggaaatatctttcgttggctccccgaaatgtgagtataatataaagaatgacaacaattcgacaagtgagaaaacgatattggaattccttacagacgagtattttccgtttgatgagcagaatgttgcctttatcatatcatgtgcatccggtaaatcttatttgattggggccagagagtctcctttcccagttgtcaatgtaaaagagattatcggtccgccttcgggtgactcggccggttttcaggttgaagtctcttgggtttctataaaatcgctcattccgttgattttatagtcttttatcgcttgttgcccagatgttacctttggctaaaaaggtaattctatggcaaaaaaattcgacctgaaactcaaaggatatgttggcggatacgacttcgactccaattatgtagagtatatcctcgaaaaaagcgaatcgaaagaagtaaatgtgctcatcgactcgctgggaggaagtgtcgcctctgctttttctatctgtgaggcattccgccgacatggaaatgttaaagtccattatgtcggtatgaatgccagcgctgcgacgattgcatcgctgggagccaagcacatcagcatagcgacatcgggcatgtatctcgttcacaaatgcagcacggtgataaccaagtgggctagtctgaacgccgatcagcttcgccagttgatcgaggagtatgacaaacagaaaaaggacatggagaagatcgacctcaatatcgccgccatgtatgccgacaagtgtaaaaaagacaaacaagcactgctcgacctgatgaaggtcggagggtggctcacggcgcaagaggcactcgactggggattcgtcgacgagatctgtgatctccctggcgatgtcactcccaaagtaaccgcccaggtgatcgaggatctgtcggaagctggcattcctttgccattctctgtaccagagagaaacgactctcgcgtggacaagatattctctctgttcgcttcttttttccgctccaatactcaacatcaacaatctagtgtaacaatgaacaaaaaattccaatcgattatcgggtgtctcgagatcgaggcaatcgaagagagcgacgggaaattccatctttccgccgatctcatgcaaaaactggattcccatctccaagagatggattcgaaaattaaagaactgaaagagactatttctcaaaaggactcagaactcgaagcccttcgcaaaaagcccgcagatgaaacgaaacatgtcgtcgacgacaaatcggcagagaaggagaaatctccattcgaatcgtatgtcgaaaacgtacgacaagcaaaagatttgtttaaccaaattccttaacaaatatggcacataatatctcattttccgacgaagaataccaaaaggccgccgagaagtggagacagcagttgcttctcctccctatgctttcttgtaaagattcactccggttcatgaccggtattcccgggatcagaaataaagagcatgtcggaacggcaaaatcgaatgctcagttcggtccttacaaagcagataaaaattcatcttccacgaccgaggtgaaatatcgagagctcgagacattcttcggaaatgtctgcgaggattttgagcccaactcggttgttacgatgctgttgggacaaaatgcctcattcttgggagaagggcagaaaacggcgccttctgctaagctcgtaatcgcttctgtccttaaaagcctcggcgaatcgttgcacaatgttctctttacggctaaaagaaatgcagaaggggatacctctgccgacctcttcaacggctttattaccatcgccgatgccgaggtaacggccgaaaacatttccgaggccaaaggcaacctcctgaagattacgaccgggttcagcgaagctgatgcgctcgatgttgccaagtccatcgagcggaaagcccacccggttctccgggctaccgagaaattcctctactgttcgcccgagtttgccgacgcctacaacgatgcctatatgctcacgcatggcggtatcgtgtacaacaagaaattcgagcaggcggtcgtcgaggggtcgaacaacaagacgacgctggcgccgctcacttgtctcgcaggttcttcgaagttcttcttggctccgaaatcgaatatgctctatggatatgacagcttgtctgaccaagaaagaattcaagtcgatcgtttcaagccttttatgctgaccctctcggccgccatgttcttcggcgttcagttctactcgatcgacccgcgcatgctgctcatggtcgatgtcacgaaacagggataactaatatttttcgtaaatccaaatcgcttcaatgatggaaaattgcctgaatattcaaaaatcgctcgggtggtgtcagggaacccccgtgcttcccggtgtccgccgccggttgtactatctttcgaagagcgcgatcttgaaatggccgactcttcctcgcgatgaaaacggaagagccacatcggccgaactgaccggcgattttgtcctggccgccgatgccaagtggaaatacatcgaccatcttcccgacaaagctcaactcaccagcgagccgcaaggggaagtacccagccagacccaactcaacaagttgacggtcgtacacccgggcgtcggggccgatgcttcggccgcggctgcctatatcaacaacaacgacaatgtgtttttggtccaagatatggccgataattggaggctcgtcggctgcgaacgctggcaaacgaaatccaccgtatcgcaagatttgggacaagggcccacggggacgacctccacgaccgtctcggtagaggctaccgatgaaactccggctcctttctacaaagggaaaatcgaagccgaagaaggcgatttcatggccgacggatcggaaataccgggagaatagtcggctgtcgagagtatggacgatttatggaaaggactcttgaacgatgtgccggagaataaacgttccgatactctcgaccgttccgtctcgaaagaacgacgatatgacatggaaggaatcaaaaaccgacaatgaaattatggacaagaaacttaccgaatctttacagaaatggctctcgactccccgcgaggagcgggactacgagcaaggaaatctcttgcttttccgcctatccgggaataagatccagtatcgcaacctcgtgccgaatccggccaaacacgccgagttcattacccggaacattcagaaatatgtaaatttccgagtgcaggaattcacccacgaacaggtgaaggaaatggaaaagaaggtcgagaagatcttcgagaagagactctctatcgaggaaaacaaccctgcgagagatttcaaaaaaggcaaacgcaccgaccacgattcgcttcccgaggaaatccgggcgctgtatgtcgagaacctcggtatcgttcagcgaatgagggacgttcaaacgaaactccggcttatctctaccgaagagtctccttgtcccgacagcgagcgatatccgttccttaaagagctgatctcgctcgacaagcaactgcacgagaattgggagcggtacgaccgctatgtcccgcaacagggacaggagagcggaaacgcgccgggctctctctccgaagaaagccggaaggctctgcgcttggtcaccttgaataaaggcaaatatgcgaagaagccgacgcccgagctaaaagctaggattctggaatggtatggtcttatcacggatccggccgagaaacttaccgaagagttgaagcggttgggtattctcgaatgaagaagtacggtgaatcgttatgccgctgcctgccaccatagaaatttgccagaaagacctctttaccgccgaggacgaattgaagcggaaatacgacgaaattaccgttcgtaggcttctgcgtttgcgcgagatgtatgcttgggcagtcgccaatcccgatgcgaaagaccgccagttcgtcgaagtcctcgtttcccggcatcgcatttctcaggccgcggcctattccgatctcgccatcgttaagtcgatgatcccgaggattgcggaagcctcccgggattatcatcggtggagagccaacgagatgcttttggagacctaccaaacggccaaaaagcgcaaggataccaagacgatggaacgggcggcttccagctatgccaaatacaaccgcgtggatatcgaggacgagcgggccatgccgtacgaccggatcgtcgtgcagccctttacggccaccgacgaccctacggtgctgggtattaaacctattcccaatatcaacgagaaaatcaaagagatgctcgacaagtaccgtaaagagactatcgacatcgaagatatcgaattcgaggaagccgatctcgaagaagacgaactgttcggagatggaagcgcaaaataaggtctatttcaacgcgccgcagcgactcacgcagcttatcggggccaatactacggtaatcgtcgccggcaggcgtaccggcaaaaccgacagtatcgcctcgccgttcgtcctcaggaacatgcagcgcatgccgggctctaccggaggcatcgtcgtccccactttcaaacacgggctcacgaacactttgcccgggttattcgccgcatggaagcggtggggattcgccgaaggcatccattatgtcgtaggccgtcgtcccccgaaatggttcgcgaagcccatcaccgagccggccgactatgaacatgtaatttcgttttataatggctcggtggcgattatcatttcgcaagaccgtcccggttcttccaactctttaacgctctcgtgggtgctcgtcgacgaagccaagttcatcgactacaaaaagctcaaagaagaaacgctccccgccaacggcggcataaaatcctatttcggcgcccgctcgttcaaccattcgctcatgattttgagcgatatgccccaaacgcaaaagggctcttggttccttcattacaaggagaagatggacgtcgaactcatcgacaccatcaaagccacggtcttcgaaatttggagaacaaaaactcggatacgggagtgtaaaaaagaagggaaaccaatccccaagtatttgcaaagctatctccgtcgtctcgatacgaacctcaataaaatgaggtcggtcgccgtgtattacaaagagtactcctctatcgagaaccttcaacttttgggcgagaactatatcaagcagatgaagcgcgacttgacgccgaaaacattccggacctctatcctctgccagcggataggtatcgccaaagacgggttctactcctccatgcgcgaagcccataaatacaacgccagcgatttcgattatctcgattcgctcggctacgacttcgaccccgctttgctcgacagtcgggccgataaagacgtcgatccgttcgagcctatttgtatcggcatggactacaacgccaatatcaactggatagtcgccgggcaaccctccgggcgtcggctcaacatcataaaatcgttcttcgtcaaattcgagcggaaaatccctgctcttatcgacgacttctgcacatactatgcgaatcacgaaaataagaccgtcgtctattactacgattccacggctctcggagccaactatgccgtcaacgaccaagacttccattgggtggtttgccacgaattcgagaggcacggctggacggtcgtcgatgtctatctcgggaaccctatgcggcacgacgagaaatacctcttgatcaatcaaggtttcgcaggcaaacagcggttcatgccctttttcaaccgccagaataacgacgacctcattcttgcgatacaatctgccggtgtctcccggggtcggaacggttttcggaaagacaaaggcggagaaaagctcgaagagtcggaagaatccctgctcgaacatcgtaccgacggaaccgatgctttcgacacgctatacatcgggtgcgaaaaattcccgcagaatgccctatatcgctactcctccaacggagtcgcatgacttgacttcatagattattatttaagttaggaaaagtctcggcttgtgaaagtcggggctttttttgtattatctcttgttcgtttcaaaaaaatccctcatatttgcaatgtcaagcatttgaaacaggcgacgaggttcgccaacatagccgttggcattttttgtgcccatcggtcaatatatagttccgtcccgtgtggagcgttaatgcgcccacagcctgtttcaggtgcttgacaacggggagcggaacttttttgttcccttcccgtccttaacatattgtttcatttaattgtcaagcaaaatgaaaaaaacagtcgcattgcctgtatcgcaggcaaaagaaggccgaaaaacgtcggccttagagaaatccctcattcgatttttcgagcgggagctcgaagtgaagtttacccgccgtgaaatgtggcgaagcgtttcttttttcgctcgatctcttgcttttctcgaaaagaacccccatctttgcaatgctcatcatttaaatcaggcgacgacgttcgccaactttgccgttggcattttttatgcccagggcgatacatatagttccgacccccgtgtggagagcttaatggcctcccagcctgatttaggtgatgagcaacgggaaagcggaacttttttattcccttcccgtgttttagttaacatattgtttcatttaatgctcatcaaaatgaaaagaacagtcgtgttgcctgtatcgcaggcaaaagaaggccgaaaaacgtcggccttagagaaatctctcattcgatttttcgagcgggagctcgaagtaaagctcacccgccgtgaaatgtggcgaagcgtccgtttcgtcgcttcgttattcgtcttgttgctcgccctgtcgaccggcgagcccctgttggccttgccggcgctcgcactggcagcttacgcctatcggggcgtagccgacataacctcccgttttacggagaaaggaggtgcgcgatgaaaagccatacgatcgagttcacccgcgacgacctggtcgttcggatcacccgctacccggccggagaaccggggaaatcgccgtcggtagagatagaggtcgaatcctccggattgccccggtcgttcgtatggttcgacagggagccgcagctgttcgccttcaaggagatgctcgaagaatatatcgagacattccggccgatgaaagacgacgcagacgattcatgaagcccgaacgataatttgttatggagtatccggccccgtatctttgagatacggggttttttgtctttttggagaatgccgcatagttctatttttgagtacaaaatagaaggcgtatgatagtagggctcaatacttggtttagcgatattatattcacctcggcattcccggaccttgaactggtttcagaccagaattgggagcgcctcgaactttgggcaggagaacgatcgatattctctgtctacctttgtgcgaacgaaaatggtcttatttatttgaccgatttagggcaagtaatggagcaatacatgattgaaaatcggctaccgtttgcctctttttctcttcgagagagtcctgaacgtccggaggacccttttcgccgtgattttgtcgctgtattttccagctatttttgggacgattatgccgaatcctttatcgcccaaaatttcctgacgactttgtccgcgaaacaaatatcttcgtcggcatacgatatggtcgctttcatctcgaaaaagggagagaatatcaccgttcgccatcatgtcgtattctatgccgacgggattctcggaacgatggactgggaaaacgaggggacagaggaaaaggatatcgcgcagcatgatatcaacgtgtcggctatgaattatgaggcggaaattcaggagtcatacccggacaaagagataaagctcctctctttctccgtgtcggtaggccctcgaaatattacctactatgtcatcgatcgaaagaatctcacccagatgtttttcatcaacgcattcaatgtgttcgagctctttgagattcaaggtgttaccaccgcaaagacaaccgtcgagcgagatacggctgtgatcaatcgccgggagacattctacgaccggacaatcgaaaaaaagtatgaggtgcaaacgtcagctctttcttccccggtgaaagactgggtggagcagttcctgttctctccgctcgtgaagatgttcgaccccgacgccgattctatcaatgagatgaccgaggtccttatcaccgaatccgcttgcgaaatcagtaattcgaataccgaactcggcaaagtgaaatttacttggaaatatgccgatgtctatccccgtctaaattctatcgatagggaaacaaaggaccttttttcacaacagttcgagttccaatttaaatagttatggcgcaatctattcacatcaataccatgcgggaaatgctgaaagccggcgatcctgtcgatataactctttggacaaaatccggccagatacagcactggcggaattgcatatcccttcgttacgatttttataaaggggttcgtcgggtgaagctgctcgacagccgccaaattcgcacggtacgcgatgtgtgtatctttgaaatcaacaatctaacagtattcttatgagcgattttgagcctatcgactttacgagcatcgacgatattcccggtatcaatgcaaaagccttgttctcctcggaactgagcaaaacagagttccgtgaaacaggcgatatttcgcccgtttccataggagataagcatcgatatatgccctggggagccgacgaccagcttccgtatgatattctcgagctgatcgagcgcgacgaaaccttgtcgacctgtcagatgttcaacgccgaaatttgctatgggtcggggcttctctacaataccgaggcctgttcggaaaaagtcaaggaagaaattgattccttcttcgtcgggaataatataccgacaaactatctgggtgtatgtcaggacttcaaatactttgccttttgcgcgaatgtcattattttgaacggagacggttcgaaaataattcggttaataagaaaagaagcctgttattgtcgcctgggggttgccgattcaaatggccgcatcgataaactgtactatgcaaattggcggaaagctaagccgatggaagaccaggtcgaaatcatcgacctgctcgacttgaatgctccgctctgcgaccttatggtgcgcatggggcgcatgcccggcgacgacggggaaacacgcatgagaacggacacaaggaaatttgccgttctgacaaaggttcctactcccgataatacctattatccgataccctattatgcttcgctattccggggacggtggtacaacatcaagcgacttattggcctggccaaggaggccaaactcaagaactcggcgcccatcaaataccacattgaaatttccgacaaatactggaccggtatcttccgggccgaaggaatcacggatagagccaaacaacaggcgagggttgtcgaagagaagaagaaaatactcgaatttcttaccggtgtcgaaaatagcgggaaggcttggttctcccaggtttacaccaatccgaacggcgatgtcgtacatgatgtcgtcatcaacaagatagagaccgacaaggagggcggcgactgggcttctgatatcatcgaggccgtgaacatgatatgcttcaccatgcgggttcattccaacctggtcggctccgtgccggggaaggcgcagaccaacaacagcgggagcgacaagcgcgaactctacactatcgcccaggctttgcagaagccctatcacgatttgctcttcaccgttcacaaccttgttatccgattcaacgaatggaaaggcgcatatcccgactgccccttcattatgctcacgacactcgacgaaaaaaacgacgcgaaaacagttaccgttaatacttccgaaatatgatcatctcgaacgatttcgaattaaggcgttttatccccaacgttatgtccaccgtagaaggggagggttctctctatgagaagatagagccctatatggggctcgtcgaagcctcgctgtccgatattttcatcggtcccgagatgctggcaaatccccggtcgatgcccgaggcgctgcgaaatgccgcatcggtctatgtcgccaacgaggcattccgtatggctgtcccttcgctcgacctggtactcactcctaacggcttcggtatcgtcaataaccagaatgtcgtaccggcatcgaaagagcgaatcgagcgcctgatgttctctttggctcagatgcgagataaagctgtttctactatggtgatagccctggcggatatagatggctatgccgagacccctcagggagagtggttctcctcttcattgttcctgcctttggccggtcacctttccggactggtcgaccccgaaaaacccatgtgggacgagtacctcaggattcgtaatatcgctgagcctctcgaaaacgaggcggccgatgaatttatttcgcccgaactgatgactcgtttacgtgcggcccccttcgagaaaggttcgggttatgcccggctggccggccgtgtccgccgtgttatcgccggggcaatacccggatcccctctcgataaaagggcgctcactgacctcgtgaactttattcgggagaatcccgataaatatcccgaatggcacgcctcccgaacggccgggctgttcgaccctcccgttttcgggaacgataaaaagagttcgggatattggttttgactttaattttttttgatatgaataggaaaatagcgattacattgcccgtatcgtggcaggagttgaccgataggcagctctattatctttacgatctgtttttggacaacctttcggccgaccaaattaaaacctattgtttcttcttgtggggaaaaatcaggatagaatgccggtacgacgaacatgattacatcgtgcggcacgataaggaaacattcaaagtcagtcgggaactgatagcttcggctatccacgagctcgattggatcgtcgagattcccgaatatccggtgagaatctcccgaataaggaaacatgccgctctccccgccgattttcaaggagtcgaattcgaaaaatacatctactgcgacaacctgtatcagggctatctttctacgcagaagcaagaacttctcaacgagatggccggtatcttgtacaatgcgccgggcataaagacgaacgccgccgagaaactttctaccttctattggttcgcctcgctcaaagagctgttctcgcggactttcccgagctttctccgaccggcgggttcgatgacgtcggaaaacctgctcgaacagggagcgcctctcggccgacgattgcaagaagcgatgaacgctcagatacgagcccttaccaaaggagatatcaccaaagagcgtgaagtattgtctatggatacctggcgagctttggccgagctcgatgcccaggcgaaagagtacgaagaattaaagaaacagtatggaaagtaaatcgttcaactgggacgccgccgatttctttcggcggctgaccgaaaccaacaaactcgcccggtcgaagaatttcaaattctgtctcgtgagcagtttggaaggattcgaggaagctctcgcccgcatgcagagctctacggcgttcgtatgcgtgagcgacgtgtcctccggctccaccgatttgaccaacagcccgcataccgttcggacaaaaacagtgtttttcgccgtgcggcataaaatcgacgatatgaaggcccgcatggaagccttcgacttgcaacgggaaatttttcgccagttcatgtcgaaactgattctcgagagcacgcgcctcgccgaggaccgaatcttcatcgaccagaaaatccgattcagcgagatagacaaatatttcttttccggctgcgcctgctcctttttcaacatatccgtaagtacatacaccgatttaagacttaacgccgatgaatgggaataacataaccgaagataaggcgctcgaagaacgggccaaatttataggggcgtttaacgggacgatgatcgacatctggaaagagaagatcgtcgatatggacatcatagacaccgggagtttgctcgattcggtggccgctctccccgtgcgtgccgacggccggttctccgaggtcgtcatcgtacagtgttttctcgaatatggcctttggcaggattacgggacaggccgggaggtatggcggggaaatcctggggatatatatcccggacaaaaaggtcggaagaaagtaagagagcgtcgccggtggttctcgaccaaatactactcgtcggtgatgaacttgcgagattttatggctgacagcatgggtagggagtttgtcggcatagtagccgatgcattcaacgaccagcggctgaagaagtcgaccgaattttataagaatcactcgttgtaaggaggtttgaaaatccgcttgtaaagtcatatagattgccccgtgtgccgaatatgtgataaaatctgaaaaattcacttttttgttaagtttgcttggaaaacacgataacttgctatatctttgcaatccccaatcgttgtatagttttatatgggaaaacttgaattggtaatagagtctgagaatatcagcatttattctccaaaatttgatggggagactatgaccgagttcgagaaattcatgtttatcaatagatatttgtcttatccccagttgaagagagatttcgatgctattattagcgtcattaagaaaatgactgatgattgtggcgcgagagaaaacctttttagactggaaggaggaaatattaaagccataccgctctgtgtctcccttcgccacaaagatcggtctgttggaacgttgcgattatattgtatccggatatcggataagatacttgttatagggaatggcggaataaagagaactgacacttttcaagaagatccggctctactcagtatagtaaatcaactcaggcagattgaacatcagatttttgttgaatccaaaaaagctcatgtcaattactatgacttcgataaaatgaaaccgataattgaaactatcaccatttaaatataaattatgaagaagattccactatttgaacaatgtgttgcaaatgttgctcctgaggtgatggaggaggtaaatctcaacattgacattgcaaacagaatttatgaccttctcaaagctaagaatttgactcaacacgagttcgcttcccgtatgggtaagcgcgattcggaaatctcaagatggctgacaggaactcatggttttacaacggcgactcttgctaagatttcagcggttctcggggagcctatcgttgaagttcgccgagaatcgaaaactaagtatatctttataacaatgccttcttataacagctcattagggatttctggcaatagttatactagtcatgagactaatacatgtgttatttcatacaaaaactaattcattatgacagagagtaatgtaaatattcaaatgagacttacttctgtaaatgaagtgagttttatgatgtcaccgggcaagattactgaagaggtgcttcccgaaaatataaaacttggtttctccagtcagattcaacctgaagtggagaataataaaattgccttgatatttggtatcaagtatgaattggagggagataaagtccttgaatgtgtatatcgatttgaatttgaagtgagtggccttgctcaattcattacgatagaagataatgatggcatcacgattacatatatcatgcctcatcttattagtgtggcaatcggtactatgaggggtattttagtcgtaaaaacggcagggacaaatctttcgaaatacccgctccctataattgacccgatgcaattgacacaaactctgtcaaatccttaagattgttagttaatacaagatttatttctaaaaagcatcggataaaaaccgatgctttttttgtgttttctcttgcttttctcgaaaagaacccccatctttgcattgtctagcattcgatacaggcgacgagtgttcgccaactttaccgttggcattttttatgtccatcggctaatatatagttccgtcccgtgtggagcgttaatgcgcccacagcctgtatcaggtgctagacaacggggagcggaacttttttattcccttcccgtgttttattaacatattgtttcatttaattgtctagcaaaatgaaaaaaacagtcgcattgcctgtatcgcaggcaaaagaaggccgtaaaacgtcggccttagagaaatccctcattcgatttttcgagcgggagctnnnnnnnnnnaaagctcacccaccgtgaaatgtggcgaaatatttcttttttcgcccgatctcttgcttttctcgaaaagaacccccatctttgcaatgctgtacattttgacaaggcgacgacgttcgccaactttgccgttggcattttttatgcctatcggctgatattatataagttccgacccccgtgtggagtgttaatgcacccacggccttgtcaaggtgtacagcaacgggaaagcggaacttttttgtttcctttcccgtcatcagtcaacatattgtttcattttaaactgctgtaagaaaatgaaaaaaacagtcgtgttgcctgtatcgcaggcaaaagaaggccgtaaaacgtcggccttagagaaatccctcattcgatttttcgaacgggagctcgaagtgaagctcacccgccgggaaatgtggcgaagcgtccgtttcgtcgcctcgctattcgtcttgctgctcgccctgtcgaccggcgagcccctgttggccttgccggcgctcgcactggcagcttacgcctatcggggcgttgccgacataacctcccgttttacggagaaaggaggtgcgcgatgaaaagccatacgatcgagttcacccgcgacgacctgnnnnnnnnnnttgttcgccttcaaggagatgctcgaagaatatatcgagacgttccggccgatgaaagacgacattggcggttcatgaagcccgaacgataatttgttatggaatatccgaccccgtatcttcgagatgcggggtttttttgtctttttacgattcgtcattcgtccatatttttgaggaaaaacagaaatactatggctcaaatcgacgaaatcaaatcgaaaatcaaagctctccgtgcagaaaccgaagcgaacagcatcacccccgacagtctcgggcttattcttgacgatatggcttctttgattggcagccaaaattctggccctatcggagtagcatcaccatacatcgacatcacgctgaaaatagaacaggggaatcttgtcctgtatccggtcgaatacctaccgactggggcggacgcctcgacgtttgaaattcgcctcatgcgccatatctctacgcgagacaggaattttgataaaaaaggatatcgaaaagtggccggctggcgaatcccgcagaacgtaaacaacccggaatcaaggttccagttctatcggtggccctatacgcccggagccgcaaccataatttcgaatacacctgatgagattggaggacaagttgtggaagacaaattcccgagagtcattgtccattatggccgatataaacaagaattcatctttacagaaacaccgcgtggtgcaagtcgagaacagattgtagttcgacagtttggcctggctgtgttcgacgggagaactcgaatttcgaatatcgcaaggttctcgcttcgagtagtcggtaatgaaattcccaatggcgttgatttctcattcacttttgaaaaaggggaaatgttaaaggagaagatatgaaaaaagcccgaagactattccgtcgggcctacaaaaggatttttcactctggactgcccgaagactattcagtcgggctaggacaaagatacttattatatataaaatatgacaggaatgcatgaaaaatattcatgggaaggaataaaattcgaaatcgtattcgaagattcgcaaggtaatcccctagatgccgaaaatatggttttccgcttcatctatcgcgatgaagccgggcagtcttgtgtaatatcgcagagtggcgatgaacgcgttaattgcgtctttcgcgacggtaagctgataggcatattcgagccgaatacattccgccgggggattctcaccgtagagcgacgtttctgtcgggaggatcctgatttcgaaaaaggatattgcccgtacggaagacaagaagctacaaacatcaaaattatataatgttatgggaacatgcgactgtgcagtagtccaagagcgagtaatcgtgccggaggccgtcacagtaaaagaacagatcgtcgttccagacactgttacggtgaaagcgacggtcagcgtgccggctattgttcaaaaaccgaggtggattcctgatatcgaatggggagatttggaagaatgtccgaaagatagtatatggtttgtcgttacagacgaattaccgtcggccatcggtaggccgcatgttcaattcagttccttctatgaccaatatttcatagattggggggacggagaatcttatgcttctccgacgagaaccaatactttggactttataaaccatacttatgccaaaggaaccggcaatatagacagcaaaggcagagagttctggataatgaaggcaaaattcagtaatccggcacaaagcgatattgcccctaacggatatgtgtatgtaaaagtcggcgtaaaattggcatggaatatatcacccataaaatatgtggtagtcggagaagacatagacccggactataattttgaatttaatcaagggtgggatcatttggaggcgataagatttaaaggtaaagacaggagcattagagactttccttctttttcttatggcagaactcctctaaggcatattttgacggatgggactcttaaaattaggaaactgagcggttatagattctggaatatcatagccgaaaatatggataacattgaagtgtcgggaggaactatcggagaatatatttgggggaacgacaacatggctttcggtaaagccgatttgtcgaaaatgactttcggcaatctttctcactgtttctatgggatcggacgaagtgttgaagaagtgattttaccccaagtagaatataccggtaacgatatgacgaactgttttaacaattgcagaaatctaaaaagaatagttttcccgcccaaaatggattatatagagaaggccaacggtgcttttgtcggttgctattccctttatgactttgaattcccggaaggatttgcaacgaagggtaacggactcagaatacaaatgtcaggctttaataagaccttttcgttggattggccggacgttaaattggactggttcgtttacaacggaatagttgcagagggtaatgtaggcctgcaaaatttaatcttctcgaaagagtcgaaattttcatattcgactgctacgaacttggaaataaccaattcaccgttggggcatgacaatatcgtgagcatactcgatcgattgcccgattttacaggaatgagtcctaagaccattaaactgaccggttgtgtaggagtttcggaattaacagacgacgagaaaaaaatcgctacggataaaaattggatactgacggtatgaaaagactgagagcaaaagacaaatacgtatttgtccataaggataggaataatggtgtaaccatagtctcggaaataaattatccggagaattacaatccttgtgcttattgggaggaactccccgaagcggaggcgagagaattggaacgagtatttaacgagagacggacgaattgatatgcaggagagaaacgtattgcaagaagtatttacagctacgctgacgctgtttaccgatctgttggagccggtgaagtggtttattctcgcggccgtgtgcttgatcgtggcggacttgaaattcggcatcgaggcagctcggaagcgaggggagaagatacggacgagtcgggcgactcggcggagcgtgaacaaattggtggattatatttgctggatattggtggccatgagtttcgggaaagtgttcggcgaacctttcggattgccgatactcccggcattggtgctgttggtggtttacggttgcgagatcaattcgtgtttcaacaattacttcgaagctcggggaagtaagttacgcatcaatatcttcaaactgttcaaggataagagcggcgatgtgatcgaaccggagaatagagacgagtaatcgtctttcgaaagaccgttcattatataaaatctaaaagaaaatgaaggtgattctagacaacggacatggtcgggacacagcgggaaagagaagcccggacggaaggttaagggagtatgcctacgcccgtgagatggcccgcaagatagcgcaggatttgaaacggcagggtatcgatgtatccttgctcgttcccgaagatacagacgttcctttgaaggagcgtgtggaacgagcgaaccggatttatgcggaaactggcaagcaggctatactcgtatcgatacatgtcaatgccgccggtaatggttcgacatggttttcggccagagggtggagcgtgttcgtcgatccggcggcatcgcaagacagcgagcggcttgcgacgtccatagccgaagccgccggaaacatcggcctgacggtacgcagggagacgggcggccgcaattattgggtaagtagcctttacatctgcaaacacacgaattgcccggctgtattgacagagaatcttttccaagataaccgggaggacgtggattatcttttgagcgatgcgggcaagcaggtgatagtccgtttgcacgtaaaaggaattatcgattatttgaactcgttatgaaaacattgccctggcttctcgtcggtatgcttctcgttgtcgctttttggggctggttacgccccatcaataccgctcccgagggaaatcgggagaaagacaccacgacgtttgtcgatacgattccctacttcgtcccggttccccgggatagcatagtagtgaaatatgtcattgcacgacttccgtccgctgtcaatgatagtgttgggagccatgcagtcgacaccgtacatcggagcgatagcgttgcggtcgctattcccattacgcagaaagtctatgaagacagtacctaccgagcctatgtgtcggggtatcgtccgagactcgacagtctgtttctctttccgaggacgcagattatcaccgttcgggagaaaccccgcaggtggaatatcggagtcggagccggttatggccttaccccgcgaggtttccagccattcgtcggggtgacggttagctatactctttgggcgttctgatagttgtttttagttagaatgagcgatgcagtctgcttgtgaaagcgggctgcatttttttatagatacgcctcgataccgggcttttgtacatattccgctatttcgaaatacggaatctgcttttgtttttcagggcagtagggggcacttccgactgaaagaaggaaaaaaatttcctttttgaacccctaagagcttattttttagggtattaagtttttgaaggctggaaaaagtgtggggatttgaaaatctttgcagtgaaaaaaggaatttatatttgattgtcagttatttatattgtgttgatgtgaccgttgaagtatattccgagtggtatttcaaatcctattactgcatattttataaatcgggatataatttattatattatcaatgttgtgataaaactaaaataaaatctctatatttgcaacaaacatatgacaattattctagtttagatagtatgtttggctttgttcaagagaaatacgaaggcaatataaaatttatcataatgccatagattgtgacccttttcatcgtactattgttctataatataaaatacaaaaaggaattatggtaaaagtaatagataaaatagaggcatttgattatatgctccaactttttgaagagtggagagattctcatgaagagttaaagaataagccgttgtctaaacttacagccttgaaattgctgtttttgacggctgctcctaaggagggtgggggcaaagatctcttggagatatttaataacttttatgccatgccatatggcccggtggagagtgatgtgtacaatgcgattcaggaaggtgatttgccatcatatacagctaagtataggacaattgaaaggaaaaagcaagagtccgaaactttaaattataaaggtcccgaatttgaccagatacgagaagcggttggctctcttcgcgaaaagaacgaattgcttattgggttaactgcctttgaactggtagcggttactcatagatgggatagttggaatcgggcaatggattttgcagaatttatgggtcaattgagtgctaagatgccaatagactcaattcgcaaggattccaataaacggtttagtcttactgattaaattggagggggataatggaattgcaggtatgctatgaaaaatataaagttgagtttgggaatgagaagtggagccatatagattataatgatggtgaagcatgtcaagctttttataataaaatccaagatttcatagaatttagttttatacatcttactcgatcaattctttctggggagtatataagggagaaaaattttggtgaaattttggagaagttcaaaaatgaattatcagatattcccaaccccccagtagtaccagtttcaacatctcaagagcgcattcagctagaatttttttatttgggagcttctttatttaatgcaatagtatcctatgaatcattcttttttattattagaaacaagtataaaaaggggaactatgaaaatagtaatgtttggttgagaagattctttcggaatactgatagacattcgttacttgagaccttttgtaatattacgatttttatttgcgaatatgaatattatttattggttgatgatgagagagcctataaacttttagaaatgagggattctattgaaattattgccaataaatcctctgttggagtaaaggaaatatgtacattgctgttacaaaagacggcgtttattcttcgtagagtaagaatagaaccacttcgatatatcacttcaaatctaaaagaagaaacaatttatccagataaacttgatgtcggggattattctttgtttgagaaaatttgtgagcaatgttcagatccagattcaggttcaaaagatgataaaatagctccatttgttttcaaaatgagggactataggacatctttaaaaaatgagatggatattaagtcaatggacgatgttattgcagattttaaaagagcatacggtatatataagagtgatcctaagcaacaaaagagtgagatggagagagttagtgatgagttctcctgggattctgtatataattatctttataattgccgcttttcttttcttactcgagtaaaaaaagatattaaactaaaaaaaataaaagaggagttaagggtcattgaggatatacaggctgcgacttatatacaaaattttcacccctatgagaaggctattcaatccatcattgattgcatacagaggcatattgataaggaagatatcaatgaccatttaatggaggataaattctcagagctggagcgtttgattcctttatacaaagaacggatagaatggtgtaaatcacatgtttttattgcgttccaattgccgtttgaagagtcgtgtgtatattcagaaaaatatgaattaaatttgtttgtgccatcgccgtttgctaataacgatgattatgatgcattggctaaacgtgcagattcttatgagcagcagtacaaatcgcagaaaatgatatatgcggttaccaaagaaaaggtggaaattgataaaatcaaatcctctattaaaaataccgataagaaagcttttgatttgatagccatatttactactgcaataacttttttgtttggaatagtaaatatattcattatgaatgatgaagttaatcttccattactcatttgtaatacaatgggattaggtgtattgttaatcctgtttatgtgtttgtatcttcttgcctctccaattttaatacaacaattaccgtggaagcagtatgtaaggactagaagattctatttgggaattattgctattataatatacatgggattaacttgtttcctttataatagatttgaatatataggtagtaaagtggaggaaaaagaaaggacagagaatgtggaaaaggcctctgaaaaggaaatacaaattcaagagcccaataatattcaggataaattaaaggaataatacaagtgtgtataaatagagcaattgtagtatgtcataatagtagtaagttgctacgttattttaagatcttggttaagtcatttacgggagtaagctcttgttccctttaatttttgataccgcaaggagttatatttatataccctataataaagttagaggtcttattttttttgagcctctaatttccaactgagagggtaagaccgtatttttactggttacaagtaattctttaccttgtttcttctcttgaacgctgtaagacaaatcaaaggtatataattgattccccttatataaatctcgaatctctttcacgttgtcataagaaagtacccattttatggttgttctatttagaagaaacgaagcaagttctgcatgatcgttatgagtataagaatttagatataattcagcaccatgctcataatatggtgggtccaaatatattagatagtgcttcttttcgttctgtggaagttgatcaatctgttgtagaaggaatagagcatcattattcatcacctcgattaaatccttatgagaaattacttttataagtttttctcgcaatctgtcctttatatatcttgcatctattttatatttagcattgctttgcttttcgatggttcgtccaccgattggtcctgcggctaaaataccggatctattacatcgattcagaaagaaagtagcaaatcccaattcaacggaaaactgactatgtctattgatgaaaatatttttttccttgtgccactcttcgagattaacctttgtctgttcaaagaggttcatgaactgttcagaatgatttataagactattccaaaacgagtatataggaatacttgcatcattgatgataattttgtcaacctgtcttgtaaatagaaggtttaatgcagctcctgctcctcctgcgtatggctcaacatagactacattgtggatattattcgccttaatgaagtcttttaaaaaaggactcattaccgctttacctccgggatatcttagtggactataattattgttcattggctaaataagagtgcataaaatctaaaacaggagctaattcatttgcgcatatttcaagagctgaatcatgagcagaatggtaattattatgcacaaacatattaaatgatttcaaatctacaaaattaccatgaccctttttgaacttttcgagtacttgaataagacgggcatcattattaaatagatccttatgttgtatgatatatagtatcattgcgcttaattctgggattctgtttggcatggtgtccttttgagagaatcgagagagtttctgtaattcttcatcatctatttcttcgtcactgatggcatacttactttgtagatattgtttgagttcattatattttttgtcatttttttcttgtgttttcgcggcatcatcagaaaggataagtccgatacacccctttttttgtaagaattgatacaccaacatatcaacataacacctcaatgcaacggcaacaacatctgtatgttttttataatttaaagattgtaagctgttaaagagagtatctaatttacgattacctgtttttgtccagttatataccgtaaatagaccgcttttactcctttgacgaggattcttagacttattacttacagtttcaaggtttgttagagcattattagattgtgaaactatttcttgcgatgggggctcttctattggtgaatcgctagcttcaatggataaatcaaatttatccttatcatattctttttttatgctgttaatatattcgttcttatcttgttcattattgaaagaacgagaggttaattcttgattaagtatttgattgactataaatttaaatcttttgtcaaattcctcttgcggtaatctccgttgaatttccccattgctattgaacgctattcctaaaaaattagctcctttttcatcttcgtaaaacctttcgaaattggtaattgggaaactatctaattggatttgttcaagttcgtatggttcatctttgaaaagacttatactatattgatgtacagcatatcgtcttaaagattttcttatctcagactgggtgacattgaattttgtagctacttcgcttatagataaattatcccctttaattaaatttactagaaaagcatcttggctgactttgtcccatttcacaagaggaatccctgtatgcttattgtagattagagtatcagcatctctacgatctgacacgataatacaattcaatttgtcattgataggttcatattttgataactcttttgcccgagctggagacaaatatttaacagggtttagtagtactttacaagctgcgactcgtcgattcccttctaggacaacgtaacttccattttctttacacacaataggtgcttcattcaataagtatccattgatagctatatccttcgctaagtcatatacactataattttcaattagatatttaataatttctgtttggttcatttcttttgtcgattgataagagaaacgaggatttttaatatctaatttgaggtgctcaattgataatagcctggttttccactttgaatagtcaattctcatatgtgatagatgtgattggtttctatatttatcaattaaatgctaaatatataacgaaaatgctttttgacaaagaacttgattctttttttattatttgttttttagaaaaaaatcccccatctttgcaacgacttccatttgaaacaggcgacgaggttcgccaactttgccgttggcattttttatgcctatcggctgatgttatataagttccgtcccgtgtggagcgttaatgcgcccactgcctgtttcaggtggaagtcaacggggagcggaactttttttgttccctctccgtctatagatcaacatattgtttcatttaaatgacttccaaaatgaaaaaaacagtcgcattgcctgtattgcaggcaaaagaaggccgtaaaacatcggccttagagaaatccctcattcgatttttcgagcgggagctcgaagtaaagctcacccgccgggagatgtggcgaagcgtttcttttttcgcccgatctcttgcttttctcgaaaagaacccccatctttgcaatgcactacatttgaaacaggcgacgaggttcgccaacaaagccgttggcattttttgtgtccatcggtcaatttatagttccgtcccgtgtggagcgttaatgcgcccactgcctgtttcaggtgtagtgcaacggggagcggaactttttttgtcccctctccgtgtttatattttatttattcattttaatgcactacaaaaatgaaaagaacagtcgtgttgcctgtatcgcaggcaaaagaaggccgtaaaacatcggccttagagaaatccctcattcgatttttcgagcgggagctcgaagtaaagctcacccgccgggagatgtggcgaagcgtttcttttttcgcccgatctcttgcttttctcgaaaagaacccccatctttgtaatgcgttacatttgataagggcgaggaggctcgccaatagttatgctgcgagcattttttgtgcttgtcggtcaatatatagttccgtcccgtgtggagcgttaatgcgcccactgcccttattaggtgtaacgcaacggggagcggaacttttttattcccttcccgtgttttggttaacatattgtttcattttaaatgcgttgtaaaaatgaaaaaaacagtcgtgttgcctgtatcgcaggcaaaagaaggccgtaaaacgtcggccttagagaaatccctcatnnnnnnnnnngaagctcacccgccgtgaaatgtggcgaagcgtccgtttcgtcgcttcgttattcgtcttgctgctcgccctgtcgaccggcgagcccctgttggccttgccggcgctcgcactggcagcttacgcctatcggggcgtagccgacataacctcccgttttacggagaaaggaggtgcgcgatgaaaagccatacgatcgagttcacccgcgacgacctggtcgttcggatcacccgctacccggccggagaaccggggaaatcgccgtcggtagagatagaggtcgaatcctccggattgccccggtcgttcgtatggttcgacagggagccgcagctgttcgccttcaaagagatgctcgaagaatatatcgagacgttccggtcgacgaaggacgagaccgcgcgataattttttgctcccggcttgcgaatgccgggagtttttcgtatcttcgaagaaaaggaggaaatatgtttataatcgaggccttaggatttgtgctcttgttcgtgataattatagctcttggagtattcacggcggctagcgttgtattgtcgtacatatattggatcgtggtagctgctttttcggtcacggcgatagccgctctttgcagtcgcctcgttcgctttttcaaaaggaaagctcgtcgttcgtaatacgttattgtagaaatagaattctcgtcggagcctcgggaaatcttcccgaggctctttttgtgtctttttccctctcgccgggagtggccatattcgtgaaaaattaatcggatatgagtaattacgaaacatcggcctccatcaccttggaggtgaacggcaagaacgcggaggatcgcttgaaggctcttcggcagagagccgaggatctggaaaacgctttggcccgtgcccggaataccggagacaaaatcgagatgaacaagctccaaaaggagctgaaaaagacgaataaggagattagggagatgtcgtcgtcggctcagcaagccgagaacgtcatgcgccgtctcgacagggctaccccgagagagctctctaaaacgctatctaccctccggaagcagctcgacaatatcgagcggggatcggccgcatggaatgcccagatagaaaaaatcaaagcggtgcaaagggaattgaactccgtaaagggttcgatgaaagaacatgagtcgttgtggtcccggttcgcccaaaaaatgtacgactggggaagcgcccttacgatgtccatggccgcgatatccggcttgaccattaccggcaggcgggctgtacagagttatgcggacatggaaggcgaaatggcgaatgtgcgcaaattcaccggcatgacgacggaagaggtcgagcgactgaacgaatcgttcaagacgatggatacacgctcgtctcgcgagcagctcaacaagcttgcccaagaggccgggaaactgggaatcgcctcgcagcaggcggttatcgaatatgtcgaggcggccgatgtgatcaacgtcgccctcgacgaattgggagagggggcgacccgggatatcggaaaactttcgtcgatttacggcgatgccgagagaatgggcttgggaaaagccatgctggccgtgggcgctgccatcaacgaagtctcccaaaactccaccgcttcggcttcttatttggtagatttcgagaaccgtatggccggtgtgggtaaacaggccgatatgagtatccctaaaatcatgggttacgcttcggtgctcgaccagaacgcccagcaagtagagatgtcggccaccgctttgcagggcattatcatgaaaatgtatcaggatccggggaaactggcccgcatagcaggcatcgacgtgaaagagttcgcccggctggtgagggaggatgcgaacgaggctttgctgcaactgctcgacaccctcggtaaggccggaggcatgcaggcactggctccgatgttcgacgagatgaagctcgacggatcacgggcggccagcgtgttgtcggtgctggccgggaatatcgaatcggttcggagagagcaaaagctggctcaggaagcatttgatgaaggcacatcggccattacagagtttaatgtccaaaataatacggtgcaggcgcagctcgacaaggccaaaaagtcgttcaacgagttatcggtcgagctcgggaaagatctgcttcctgtcatgcgccatgcgattaccggtgcgtcggccttgctcctggtatttaaggaggttatctccgttatgaaagagaatagagttttgatcgtctctgtggcggccggtatagccggatatacggtcgccgtgaaggcgagtaccgtcgctcaaaatctttggaatgcgacgcagaaggccggaaattcgattgcggcgacagggagaggtatcgttctattgctcagatacgcctattttagattagagggtcaggtccgcaaagccgatgtcgtgatgaaggccttcaatcgcacgaccaaaatgtcgcctgtcgggatattggtaggagccttgtcggccggagtcgcagccttgctttcctatcgggaaaagatgaaatctgctcgtgaggcggcggccgaggccgccaaagccgagcgggaatacgagaaaagcatcaccgatgtctcggaagctgccgcctcggcatcgaaggaggaactcgcacgtttgcaagcattgtatcgggcagccgtcgacgaagcccgatcgaaggaagaacgaatcgaggcagcccgccggttgcaatcgctctatcccgattatttttccaaaatgtcgaccgaacaaatcatgttgggagacgccaaagccaaatacgatgaattgaccgattcgattctgaaaaatgcgaaggcgaaggccgcggccgatttgataaagaggaatgccgagcaaatcgtcgagatagaacaatccatgccggagttggagaaaaacgctgtcgatacggacatagcctatgaccgggcgaagaagcggaggcaggaatatatcgatagatacaacataagcccgtcggccatgggcggcggttatgcgcaagatcagtcggcgcttttgtcgaatgtcatggtaaggaaatcggctcccggaaccgacgatgaacggaaggcggcggaagcagcgtggaaagcgtatgccgaagcgaacgacaagctgactaagctgcaagcggccaataagaaactggccgaggagtacggtatatctttgaccgatgtattcgccgggcagggagacggtggaaatatgagttctgtctctgcttccggtagtgcggggaaaagcggggaaagaaataagtttcaagcagaagacgattggctgtcgatcgagaagtcgaaggctctcgccggctatgctacaggattgatggattacaacgaatatatcgagaaaaaagcagagctcgataaacagtatcttctcaaaaagttgcagaacgcagaggccacggaaaaggagatagccgatatcgtcggcgagctcgacaaactcactgaaaaggaggtgacacagcggaataaagagcagttcgatgccgcaagagaggagatagaagccgaacgccgggaacgcgatgctgccgataccgacagttatatgcggggccgaatttcggaaaagacttaccagcgaatgaaattcgagtcggagatagcatatctcaaccggctcaaagagttgtatgccgagggtagccaggagcgcgccgagattgaaaaacagattaccgacaaactgcaagccgacaagctggccaagttcaaggagacgcaagacaggcagaagactctttatgaggagtatttcaaagggatatcccttatgtcggccgaagagagggagcagcagtatcggctgcaaatcgattctctgaatgccttgacgaagaagatgctcgacgcggccggaaacgacgaggctaaaaggcagaaaatcatcgaagcctctgccatcgccgaaaaggcattgaaaaagcagtatttcgaagagactacggaggagagtttcaatgccatggagaaagccaacgccgagctggccgagtggttgcaaagcgacggcgggaaagccgtgaccgactctttcggtatgatcatgtcgggaatgtcggctatcttctcgcaaatatcctcgatagtccagtcgaatatggagatggagaccgccgccatcgagaaacgctacgacaaagagatttcgttggccgaaggaaatacttacaaagtcaagaagctcgagcaggatagagagaatgagatagcccgggcaaagaacgaagcgaaccgcaagatgttcgccatgcaggtgatccaagccgtggcgcagactgctcagaacgctttggccgcttatggctcagctgcggcgatacccatcgtcggatatatcatggctcctattgcggcggccatggccgtagctgccggcgccgtgcagatcgcggctataaagaaacagcaacaggcctccgaagcgcaggggtatgccgccggcggattcacccgccccggcccggtggacgagccggccggtatcgtccatgccggcgagtgggtcgccagtcagaaactggtgacttcgccggtaacgcgtcctatcatcgatgccctcgaatatgcgcagcgaaccaacacgatcggctctatccgtcgagtgtctgctctccccgcgccgattagcttaccagccccttcgcctgatggaggaggaaactccccggacacaggcgtattgctcgccacatattttgcggttctcaaaaaattgggtgaccgactggacgagcccttcgtcacggtcaacacggttaccggcgaccggggcatcaagaaggctcaggacgaatacgatcgtttgatcagaaacaaaacccctaaatcacgcaggaaatgaaaatattcgtagagggtaaagaggctttcttgaagaaaggaacctccttcgagtttatcgctgaaaacaggcttttctctggttccgacgagtacaccttgtctatcaccttccccatagtcgattgtcctcggaatcgggcgatattcgggcttttgtatcggaaagatgtcgatatcgaaaaagtgaacttcgcctgtgaactacgggataccaatttctataaaatgggggttctcgctattgtcgaggtgtcgcaatccgaaatcaaagggcaattcctcgatggaatgagcgcccaaaacttcatcggtgatttcgacgagatatacatcaacgaactcgacttgggcgattatgagtatgtgaatatgagtaatacacctccagaatggctttggaggagcatcgaccgcatgaaaaactatatatctttgccctgggtcaacaactattcggggaatatacaaaatgaggtcgtatatgaaaatggcacttataaatggcatccggacaccaagggggtatcgtttcagccatatttgctattcatcgcaaaacaaatttgcgaggtattaggttatagttatgatttcggggaatgggagaggtcgacatatcgtcatctcatagtctgcaattcgctcccgtatgcctgggatatgccccaaatagcaaaagcccttcctcactggactgtgacagagttttttgaacatttggagaactttctgtcggcatttattgacgttgaccataggggcaagacagtgacattccatttcatcgctaatgactcggatttcaataccagtataacccttaaccatgttgtcgacgattttacggtagaggttagctccgagggggaatcttcatacaggggagtatctactttgagatattccgattgcgaccatgaaatgtggaaattctactcgtgtaactggttggtggaaaatcatgagaagatgattgtccgatatgagactctgaatgatttaatcgaggccaatgaaaacttgaaggagaccgttgtcggggttgagtatcctgattcaaatttgggaaaaatcttatatgtcgagtctttgaatacctatttcgtatttagaccggtgaagattatacctcagagctgttatgatccagtggctgatacctattatgaccagtatgtgaacattcttcaaccgataaaccagtttggagaacgcatcggtacaaatgaggaaagcgatagcatagagatagggattgtccccgcctggatagatgacacagaaaccagtaaagggcaatgtctgtttttagagctcgacttcaatgatggagaaacagatggcaattctgagtatttaccgataagtctactcgaatctggggagagtgaaaaaagtggggcatacttctctcaactttttgtcgcattctgggacggtacgaattatttcaaagggctgcagccgcgtccaattatcgacaaaatatctacgaatgaggactggacttatgttgagactgggtatagcatgcgtctaaatagggatcctagcgacctttcctatttcaactctccgatcgacagctgcaaaaaatacaatttccagtttttggcgaacaaaattccgcctgtgagggctttgttcttcattcaaggtaagccgtatatctgtgaaaaaatcacggctacattcacggaatatggtatgtcgcagctcttgaaggggacgttctatcgaaccgattaaagagtcccgtcgaggtcgagaatggctttatcggcattgtcccggtggcgggtatatacatcggtaacggccagtgagctgtgtcttgcctggtctctcaccgagatgttgctcagttttttgtccagcatctcggtgattcctgtatcttttagcgagtagaatgtgtaatctttgtcgagtttcaactcttttttcaggcgggtccagcgaatagttatgagccgtcggtctacttgcacgttgccgggcatgatgttgtttgagaataggaaatagtgaggagggtagtcgaatacccccaaatcgagcatgaacatcattacctttttcgggatagttatagtttgtgtcgttctgtttttgctgtcttcggacgggattgtcaaggtacaattcttaacgttgaaatatcgaagcctcagccgggtctgttcgatgggacgaatatagcagtagtataagagataacacgataaaagaaagtgtttgtcgttcgacatcaaatattcgcttatctgtcgaatcacagagggcggaataactttcctccttttctggaataattttcgactgaaaggttttatgccggaggccggattctcgttcataagtcctttttctacgcaaaaggagcaaaaagctttgagaaaagtgagacaattattcctatactgaggggacagtttcagttccaagtgtatgtaatcgaggaaatcgttgcaaaatcgtttgtccagctggtagaggtagatgatgggtgaggttctctgttgattataggcaaccaactttttaatctttgattcgtggctgatgtatgtctcttttctgaaaatcccatcggagtacattttcttgttattctccacatatcgtttgatggcatcatcaaacgatatcgcaaccttaaattctttctcgacccagggattccacccccggataagttgttggtaaagccggataatcagacctgcagcatactcccgcctctgtttctttgtcgccaatcggtttatctttattcgcttccttctcattttccctctaactgggtcgaaagcgtaaaactcaacataccaggcagggtcattttcacgaagccttgggtatgtaaaacttattatttcgtcgattgtggatttttgtggcagattgtcaatgttaaaatcaatccgcgcgggaatcgtatttttaagcatttttttatttaacgaatctggggtgattcgctaaacacgagcgggcttttgatccgtattagccctgttttagggaagaaaaacctcaaaagcttaatacgtaatcttttgaggtttcattccttgttgtagcgattccgggaatcgaacccgagtctcaaccgtgagagggttgcgtgctaggccactacactaaaccgccattcgctttttgaaaagtgatgcaaatataaccgatttgtttttattgaacaaactttcggtatgaaattttttcagtgtctcgaataagattgttattgttttgaatatgaatgactaaattattttttctaactccttgatgtttttagctatttcttcttctggtaaattgtagttcagaaggtctcctgctaaatattggtcataggcagccatatcgatgagcccgtgaccggatagattgaagaggatgcatttttcttttccctcttcttttgctcttaatgcttcttgtatagtggcggctattgcatgagaagattccggggcagggataattccttcgcattgagcgaataatgtagctgctttgaatgtatcgagttgttctatgtccacggcttccaagaggccatcttttttcagttggctaacgatcgttcctgctccgtggtaacgtagtccacctgcatgtatattggccggggaaaagttatgtcccaaagtgtacatgggcagtagaggtgtatagcccgcttcatctccaaaatcgtattgaaaaattcctttggtcaatttgggacaggacgcaggttcggctgcgattaaccgaatgtcttttccctcttttaatttatggcgtaaaaatgggaatgaaattcccgagaagttggacccacctccgaagcaagcgatgacaatatcggggtattcgccagccatttccatttgtttttcagcttctagcccgattactgtttgatgtaaagatacgtgattgagtacactacctaaagtatatttacagttgggggtactcattgccaattctatcgcttcagatattgccgtacctaaacttccttgataattggggtgatcggttaatattttacgtcctgctttggtcgacatactgggtgaagcaataacttgtgcgccgaatgtttgcataatagaacgtcgatagggcttttgatggaagctcactttaaccatgtagactgcaagttccaatccgaatgcttttgcggctaaagagagtgcagccccccattgtcctgctccggtttcggttgtgatgttggttataccttgttttttacaatagtaggcttgtggtatggccgaatttagtttgtgagaaccaacagggcttacactttcgttcttgaaatagatgtgtgcaggagtgtccaatactttttcgagccccaaagctctgacaagaggagtagggcgccatattttgtacatatcgcgtacttcttcggggatttctatccatgcgtcggaagtgtttaattcttgtttacagagttcttctgcaaaaatcggatagaggtcttttacggctaggggagatttggttgccggatttaatggactcattggcttgttgggcatgtctgcaatgacattataccatgcttgtggtatgtctttttctgcaaggataaatttttttgtagccattttactcctttggtttttgtgatttataaagtaaaaataaagtttttgcatctaattgaaaagcaaatatatgaattttttattaaatgtatagaaaaactatgatttttttgtctatatgaatttatctttgaatttttaaatgcaaaaagagacgctgctcacgcagcatctcttttttagaattcatcacattatgcttattttaaagtgctagatagagttacgctcacgcgcgactatgcgaattatagatatcttgattcaacaaccgaccaatcgacgattttccagaggttgtgcaattgctctgctcgtctgttgcgatagtcgatatagtaggcgtgttcccatacgtcgaacgttaacaaaggagtaagtcctttggttaaaggagtgcctgcattattttctttactgataaccagatttccgtctttatctttggataaccagacccaaccagatccaaatagagtagtccctgcttgttcaaattctttttggaagttttcgaaatttccccacttcttatttatagcttctgccaacttcccttgtggactttttttcccatttggggagaatgtgaagaaataaaatatgtggttccatgcttgggaggcattattaaatagagctccgtcggcttctttgatgatttcttcgagaggcttgtctgcgaagggtgttccttcgataagtttatttaggttatcgatataagtttgttcatgtttaccgtaatggtattctatcgtttcctgactgattacaggggctaaatcattaataccataaggtaatggaggcaattcgtaaatcataattatttatttttctttgttacttatataacaatcgtcggactaaaaaagtttcgtatatctaagtatttttttctgttacttggagtatacacatttttataatgtccgattcattctctaattacttgatttcattatttctcgggtttactcgatggcttggctatcgattcacgcatggcagtgtctgcctcgacatttttcattttataataatccatgattccgagatttcccgaacggaaggcttccgccatagctctgggaacttcagcttcggcttcgattacttttgctcttgcctcttgtgctttggctttcatttcttgttcgagagcgatagccatggcccgacgttcttctgctttggcttgtgcgatgtttttatcggcttgtgcctgatccatttgtaaagtggctccaatgtttttaccgatgtcgatatcggctatatcaatggagaggatttcaaatgcagttcctgaatcaagcccctttttcaatactagtttggatatggaatccgggttttcaaggacttgtttgtgagattcagacgagccgatggatgacacgataccttctcctacacgagccaatatggtatcttcacctgcaccgccgaccagttgacgaatatttgcccgtactgttacacgagctttggctattaactgtataccgtctttggccacggctgtaaccggcggtgtgtcgataactttcgggttgacagacatttgcacggcttcgaatacatcgcgtccggctaagtcaatagcggtagccatttggaagcctaaatctatattagctttcgaagcggatacgagtgcgtgtacgacgcgttctacatggcctccggccagatagtgagcttctaattcatcacgcgtgattgttttaagtccggctttgtgggcttcaatcatagctcgaacaatgacttgtggcggtacttttctgattctcatcaagaataattggataagagagattcttacccccgatactcgtgccgaaatccataaaaggaaaggtacgaagtaaaagaatacagcgagtatggcaataatgccaattagaagaaatacgcttaatcctaccataattttatttttgtttagaagtgtttatattattccctgttttttcattttctgtttctttgcaaacaatgactaccgtgggttctatgcggattatttttacaggtgtatcttcatcaatcagctcattatctgcgcgggcttcgatggtgtggattcccacgatgatttttcccatagggtttagtctacttagtgttactcccatgtcgccgactttaatatcaggggttatcggggagggtactaccgagcttatttcggtatgcagagacattttgtccaagcttcgggatcgcataaatcctatgatgacagcaatagtagtgacggctgcaatgaataatgttattacagccccatttgtcccgaaggccgaataggcatagtaaattccacctccataaaataagaccgaacatatacctgcgatggtaattccgggaagaaagaatatttccagtaccgccagaactagcgctaatattattagtagtgtaacagctaatatatcaaacatatttcttagatttaggttctatctatgttccttttgcaaattatcgagttctatctttcgagcctgattttcgtaattttccggttgaggatagagtgtgagtagttgcgattccaaattttgaatttcggacgatagtctttttaaagttgtgcctttcgatttagcatattgagatcgcagttccgagagcttagtttctatttgaatgatattcttacgtaattctttggactttacatatagattgcgagcttcaagactgacgaattggtcaagtttagtataatggattccgttacaaattgcaaagatgaaatcggggcgagtctctttttggggttccttgatattgtccaattgttgcaataaatcggtataatctgcattttccggccaagactctcgaatagatcgaatcagagctagcgatttgatatcggttttgatttcatcgatgttatatgtttgtttgctctcattcgggataaatagatagattgtcacttttccgggaatttgttctctatccgatacaaaccaaccgatgtttaacatctcgtctattgccatcatgtaatcgttgtatatcgaattgaagggcatacctacgttttcgggtttcaagtaggtgttattttcaagatttaaacgggtgataaatatgtcgtatcctccgatcgaaccttctccatttgaggcaaagtagagtgtaactccgtcgttgagaaaaaatggataggcttcatcttgttctgtattgacaccattgggtaacggtatgatgtcactccatttcccttctatcagtttattttttgtacataattcatatcctttaccttcaaggggatatccgaaaaatacattgtctccgcgttggggaatatagccgatcgtgttttcgggaatatctatgcctagtgttttattcgttcctatccgtccagattcgggggacattttgaaatacttgaaaaacgaatcggcatcaactatcaaactatctatgatttgtacccgttcgacatattgcaacattaatttcgctctacgtgcacgagctatggctttgccgatagaatcgggtatttgttttttcgctttggacaatgcagctgtatattcttcataactgcttatggcatcttcaaagcggtattgagccatatacatgtctgctaaatagtgaggcgattcgagaactttacgtttagcccctattttcagatatttttcagcttcgttatattttttctcgtgaaaaaggcatactccataccaatggttcaacgatccatcattggggcggcgtttcagttgtgccttgaatacaggagcggcttctttgtatttaccggccttgtacaactctcgtgcttcgtcaagcgtcagtgcactcgatgagaagattgtcgagaaggcaattaggactgcaaatgaatattttagaatttgtctgaacattttcatgtttgaaaaattgtactcaaatatacaattattttttattctgaatgttgagagcgagaaaattttttaagaagtattctaaatcgtcattcgatttgaacgaattgtatggtaaaatgaaaaaaatatagtttgataagtggaagataatgtctgtcgaggtataacgtatacgggtaattcgttcccatgctatggattctgttcgtccatcgtcgaaagtacaagaaaggccgtttttgtttatttcgactgtttttgaaagtatggacatacggcaatcggggtgtagagcataagcgaaccacaggtaagagatgatcataggaaataccaaaaataaaatgataagtcctacataaataaatagagggttttgaatggatagccccacgagaaggaggaaaaaagatagaagccacccccaattattatgtaaccaaattttcagcagtctgttaaaatagtattgaggcgataactggtatgaaaaagtttcaatatgggttctattcatacaatgctttactatatatttctacaaagataatataattgatgacaaaatcaaatttttgattttaccgagatatagcctattttttatattatgtgaatatagagataatatatcgagggggaataatttttgaaggggactttttattgtacagcttttaataaatttgacctatgaaatttattctatttactgctatttcgtgtaactttgcactccaaaataagacgcaatgcaaggattatattcaataggattacttattgtttctaatgtgtttatgacactggcttggtatgggcatttgaaattgcaagaaatgaaggttatcaataattggccgctttatggtgtgatattgcttagttggggtatagcattgttcgaatattgttgccaagtgccagctaatcgattgggattcagagagaatggagggccgtttagtcttatgcaattaaaggtaatacaagaagtaataacgttaatcatattcactttattttcggtcgtagtttttaaaggagagtcgttgcattggaaccatattgcggcgttcggctgccttgttcttgccgtttatttcgtatttatgaaataagcgataatcgtatctatttaatgactaggtgtaatatagggtagagcttttccgaaaggtcggttttgccctgaccgattatcttggaacacataggtgcggtagaatcgaatgacttttatgttgtgttcgtatctatccgatggatattcttattctacaacttgttgtcctaattctcggccttatgacggggaatatttcgattccgtcattacttagtctcataaatgcggttatttcattcttctcgtttaacaatgtacaattctacttgtgaagaagatgtaaataaagacactggcgaggtatagtgttatcagagttaaacacattgagcccgtctactgtattttaaagggcaaaataactaaatcgattcaatatgcttattccaagccagcacaaacggatccaatttaggaacctctttggtagcaatcctggcattctcacgtcctacatcaaagttatgctggtatttaaaagtcgtttcaggcttgggtgtatcctttgaagaacttaagtctaagtcttatttctgagttttagttattgtaacattaagatcttcacttagctgagttttatcttgagcagagcacttgataatggaatcacggcccaagaaattatagaattttaagccattaagtatcttttgtgactaaaatctataattttagaatacaatatctttttacaaacttatacaaagactcatcttattttcaaacacttcttatcgcaaccttgataactccgtcctctctattttcaaagatacggtaagctttctcaatttcattcaatgaaaaacggtgagtaatgagcggcgcggtatctatacggcccgattctatcaagcgaagtatctctgcacaattacaaccgtccacccctccggttttaaagataagattttttccatacatatcgggtaagggcaaaatttgaggtttatcgtaaagtgccacgatcgttacaatagcattgggacgagcacatttccaagccaaacggaaagtattctcgcttcccgccacttccaaaaccacatcagcaccgccatgatcgctatttttacgaacaaactcctcgcaatgttcaggagtagttaccaatatgtcgggataatgttcttgcaaaaactgtattctttccggggactgctcacaaacaataatacgccggggattctttaacaaagcgcacaataaggtacaaatgccggtaggaccggctccaataatcagaatcgtatcctccgatgtaatttccgaaatacgtacggaccaaaaaccggttgccaaaatatcgcctacaaacaaagcttgttcgtcgcttaccgtatctggaatacgattcaaaccttgatcggcatagggcactcgaacatattcggcttgaccgccatcgatacgacaccccaaagcccaaccgccattgggatccatacaattattgacacacccacgacgacagaagaaacattcgccacaaaaagtttcgacatttacagtaaccctatctcccggcttaatacctataacatcttctcccacatcttctacgacacccaccatctcgtgcccgaccgttactcccggtacggcacgcggcacgctaccatgtttgatatggagatcgctggtacaaatacttccaagagtcaccctcacaatcgcatcgcgcgaatctttcaacccgggtttcggcttttcttgcaattcaaacttaccgggtttaacgtatgtatatgccaacataatattatccttatcatttttcaaaacttctcttacaaagataggcgaaacggatttcagaagcaagtattctttgttaaacagtgtcactacgaatcaaatagcaatctaccggtgtactctatggcaactatcagctatgtaaaaagagtatgatatcaattaaaaaatatttacttcatacaaatacaaacagctttcacaactttcttgttatttttgtatgactaaaagagtgttaatatgaaaaaccgaacaaaaaaattgtttaagattacgggtattacactgggagcgttgatagtctttctctcggcagtaatcgctttctccataaattttatatttacgcctgaaaaattgacccccatcgtattaaacgtagccaatcaaaacataaatgccaagctcgatatgaatagcgtagagctgacctttttttcaacttttccccgttttggaataaaattggaaaatggcacattggtatcaaaggctatccgtgattctttatggcaacgtaccgacacattagcctcttttcgaaaagccattgccgtaatcaatctcgtcgattatttgcaacaaaaaaagatcagtatcaaccgattatcattggatagtacaaacatatacgcctttaaaggaaaagatggaatcgccaactggaatatattgatcgccgacacgacaaatacacccgatacaacaaccgctacttcgccagttattaacgaaatagacatcaagcacgtttcgctacatcataccacggtcactttcgacgatcgggaaacgaatgtcttcgccaatctatgggatgcaaatcttaaattaaaagcaaatttaaagaaagaacagtctacgttaacgttggatttcaacaacaaaaacattctgttctggcaaaatggtgaattactggctcatcgtatcgccacccacctacaaaccgccatcgagctaaatcgttcgaaacgggctctttccttgcacgatgctatgatggagattaacggcataaaattagacatacacggttctatctgtaaagacacgaccgcacaagcgttagatatcgatctgcaatacgggctacatgctccttcgttggaaacagtccttcacatgattcccgaaagtattctcaaaaaagaaaaagtttcggccaaaggcgacgttacagttaatggcaatctaaaaggtctatatggaaaagggaaaatgccattagctacattaaaaatagaaataaacgatgcatccgcccaatatgcccaattgccctatggaatagatgaacttaaagccaactttttcggacagatagacttaatgcgacaatcgccatcttatctcgatcttaaaatatttcacttcaaaggagctcacaccgatatcttggccgacgccaaagtaaatgatctattaggcgatcccgacatctcgtttcatacccaatctacgatagacctaactgcattggcacaaacatttcctttacaagatggtgtgagtatcgaagggaaattagatgccgacatgaacgtgcgttgtcgtttgtcatctatcaaaaagaaagacataggacgaattcgggccaaaggaaaaataaatatgagcaaattggctttacgagacaaaaataagaaattcgaattcacgagcgatgcttcactgtctttcgtgggaaacgatgtattaggagcccatatcgaaataggaaatatggcttttcactcaacgcgattaaactcatcgataaacaatctatcggctttaataaaaacgaccaacccacaagatactacacgaatcgctcttgtagagtgtaaactaaatgcaaacaaactaaaagcatccctaccggatacatcaaatttattttgcggaaaaactgccgcaaccataaaattacaaccgacagaaaacaatcctacccgacccgaaataggattcgcattagaagccgacaccttgttctgccgtctcggagatactaaattgggcatggacaaagccgggattacaataacggcacaacaattaaaagactctttgtggattccaaaaggcatagtaggttttaatcggctttttgtacgtaccccacaatcggctttacctattcgaatgcaaaagactgcaatttcagtcggtaatcgagctattactttacataacgcgaccatgaaaataggaagatccgatttaacggcgaccggtgcgattcacgatttatatggcgctatgcgtcacaataaaaaactacgggccacattaacactttcctctaagaatctaaattgtaaccagttaattcggtctatctcttttccaaaagacactgctcaaatcgaaactgaatccgacactacgtcgacagccctaaaactattcgttattcctcgaaatatcgattttgaattacaaaccaatttgaatcgggttcgttacgggaaaatggttttcaaaaacgtacacggtgcaatagatatacgcaatcaagccattcacctcaaagagctcagtatggaaggaatggatgcgactatgcgcacgacgctgatctatcaagcccgacaaccagagcaaggatatgccggattcgatttcaaacttcataatatcaatatagggaaacttgtcgattttattccttcgttagatactattgtccccatgctacggtcatttcaaggaactgtcgatttcaatgtatcggccgagtcgggcttagactcatgcctcaatataaaaataccctcattacgatcagctatccatgttgaaggcgatagcctcgtccttctcgacggtgaaacttttgccgaaatatcgaaaaaatttttcttcaagaacaaagagagaaatttgatcgacagtatctctgtcaacatcagtgtcgaagacggtaatgtaactgtctacccgtttgtaatagaaatggatcgctaccgggctgccgtaggagggaaccaagacttggatatgaatttcaattatcacatatccatactcaaatcgcccatacccttcaaactgggactgaatatttcgggaaatttagataaaatgaagttcggtatgggcaaagccaaatacaaaaacgctgtcacaccggtagaaatacacaaagtcgacagtactattgtaaatatgggagaacaaattgttcgggatttcaagaaagtcatgcgacgacaattgccacaaacacaaaccaccaactaataagtatcatgttcgataaacccatatgtcatataaaatcgccctatcttcttcccgagattacacagaaatacttaatgtatggaaaaactctgcaagaagttccctttactttttaagtgaaaaagatgtactttatgttccctcctactttcgatgcatttaattggcatatatgaatgcgggaataaggtaaaggcaattttgttgtctgacagaatacatattgtttggcaggtatgtgccaattcatattgagaaaaaatagggtgctcattgactaattcactcaagactgcatacaacttatgtagatgtgcactgcaaattttaaacggattattttatcatcttatgctttattgcgatatttgcgttacgataaatctgtaacggaatgattgaaatagtatgaagcctaataatccttttcttatttcgggatattacagcccagaactcttttgcgacagggagcaggagaccagagctattctcgaagctctccacaatggacgcaacgtgacattgatagcaccccgtcgtatgggaaagaccgggctgatccgtcatgccttttaccgtttgaaagagcagcagccagatatcgatactttctatttggatatctattcaacccaatcattaggcgattttgtacgattgtttgctagtacagtgttgggacagctggactccgcctcacaaaaggctttgagtcgtataagtaagtttgtccgcagttgccgccccgtgtttacttttgacgaattgacaggtgttcctaaggtgacgatagatgtggctccggccgaggaagaaaacactttgaaagagatattcgagtatctgggctcgtcagagaaacgatgctatgttgccatagacgagttccagcagattgttgaatatccggagaaaggtgttgaagcattgttgcgctcctatatccagttcctgcccaatgtaaactttatctttgccggcagcaaacaacatcagatacaggagatgttcacttcgtcgagaaggccgttctatcaaagtacgcaaccgcttacaatcggtccgatacaacgggacgaatatgcaagttttgcaacagggcattttgccgagcacaatgtgaaattgcatcaagaagttttcaattcaatatatgaaaagtacgagggtcatacctggtatgtgcagtgtctccttaaccgcctgtacgggtacgatcggaatgtggatatggaactggtttcatacgccacagagcagattttatccgagtatagttacatgtatgcagacttgctgaaaacatattctttcggtcaggtgcgcctgttgaaagctattgcccgcgaggggtgtgtcaaagaggttttggctggagattttatcagtgcccacaaactccgggcggcgagcagtgtcagtgcttcattaaagaaactgctcgacaacgaattgatctaccagacaccttgcgggtatatcatttacgatcgttttatgagcgagtggttgcggaaacaaccattctaaaatagcggaaatattcaatagaacttagaaaaatcattatggcggtaaaaaagtcagaactatatagtacattgtggaaatgctgtgacgaacttcgcggcggtatggatgcaagtcaatacaaggattatgtgttggtcattcttttcgttaaatatatcagcgataaaaagcgtaatgacgaaggcttcgatatagatatacctaaaggttgttactttgaggattttgtcgctctcaaaggtaacccgaatattggggaggagatgaataaaaagatggctgctcttgccgaggaaaatcaacttggtggcgtttttgtagccgattttgaagatgacaccaagctgggcaaaggaaaggataaagttgaaactctaagtaaacttattgccgttttccagaatgagaacctcgattttagcaaaaatagagcggcagatgacgatcttataggtgatgcttatgagtatctgatgaagaattttgccacagagagcggtaagagtaaaggccagttttatactccggccgaggtcagtcgtgtgatggccgaggttatcgggttaggaaatgccaaaaatgggagaaagacgactatctatgaccctacttgcggctcgggttccctgcttcttcgtgctatgtgtgaaactcccggtggggcaactctctatggtcaggaaaaagataatgctactgtcggtttggcaaaaatgaatatgattcttcataatgaaatctatgccgatatcagacaaggcgatacgattaatgatcctcaatttaaggaaagcgaccagttaaagaccttcgactatattgtcgcaaatccacctttttcaacaaagtcgtggttgaagagtgcaaagttcgaagatgaataccatcgttggggcgaaggcattaaaataggtgttccgccggaaaagaatggcgattatgctttcctcctccatatcgtacgctctctgaaacagaccggctgtgccgcctgcattttgcctcatggcgtcctttttagaggcaatgccgaggctcagattcgtaaatatctcgttgccgaaaaacggtatatcaagggcatcataggactccctgccaaccttttttatggtacaggtattccggcttgtatcatcattatagaaaagtcggaagcagcagggcgtaagggagtgtttatgatcgatgccaaaggtggatatatcaaagatggagctaagaatcgtctgcgagagcaggatattcggcgcattgtcgatgtgtggcaagcacaacgcgatgtgcctcattatgcgcgctttgtgcctatggaggagattgaacgtaacgattacaatctcaacattcctcgctatatatctgctcctgatacggagattctgcaagatatcgatgcacaccttcatggaggtttgcccaaacacgatatagaccaactcgatacctattgggaggtatgtccgtcgctttgtgatgacctcttttgcgaccatcttacgcgcaaaggttactattctttgaagtgtaacccggaggcagtgcgtgatgctgttaccgggaatgtagatttccgtaatcagaaagaggtgttccagaagagttttgccgagtggtgcgattctcaccgggctcaactttacgctctcgtcccgggttttgctcccaagaaacttatcgagcagctgggtaactcgttgttggctgtctttgaggtagataagtcgcttgtcgaggcgtatgatgtttatgacagtttgatgaactactggggtgaaacgatgcaagatgattgctatatgatttcgtccggaggctggacagtgcaactgtacacgccacaaccagcttccaagaagaaagagaaaaaggctgctacgcccgaagatgtcgtttgcgacctgctgcctgtgccaatcgttatcgacgagtattttgcagagaagcgcgatgttattgctgcggccgaggagttgctggtacaaaatgagacacagcttgcggaattggtcgaggagcaggcggagaattacctcgatgaggacaacttccccgatggtaaggtgaccgatgccaatatcaagaaacgaatgaaggcgctcgataagaaaaccgatgccgacgaaattgccgtactacaaaagtatctcgacctcaaaggtgatatatcactcaataagaaactgatcaaggagtgcaagtacgatctgcttaccgctcttgtagtcaagtatgccgatttgtccgaggcggatatcaagcgcttggttatcgagcggaagtggttcgcatcgcttgccttgcgccttgatggcgagatgcagcatatcagtcagcagctcacttctaaggtttcggctcttgcggagcgttatgcacagacgctccccgagattgatgccgagatagccgatttagaagcaaaagttgctgcacatttgaaacagatgggatattgatctgaaaagttgaggttgtaagtgggcagattgataattattaaagtgtaagtgatggatataccacaaggatataaacaaaccgagttaggaataatacccgaagattgggagattgtaaatcttggtagtgtcgcaaagattaatggccgtattggttttcgagggtatactacggcagaccttgttggtgtcggccaaggtgcatataccataggtggtaagcatattacaaatatggttttagatttgcatgatgcagagtacatatcgtggcagaaatattatgaatcccctgagattatggttagaaaaggggatattgtattcgcgcaacgggggactctgggcaaaagtgcttttattgtaaacgatattggtccagcaactattaatccgagtcttgttctaattaataaaattaaatgtgataatgagtatttgtcttattggttacaatgtgacaaaatagttgaatacatttgttctattaatagtcagacctccattccaatgattacgcaaaatcaaattgagcatatccctgtggttttgtctagaatcaaggcagaacagcaggctattgctgaagcgctgggtgatatagatggattgattgcaacattggataagaaaatcgccaagaaacgcctgattaagcaaggggcaatgtcacaactcctaaccggcaaaaaacgcctccccggcttttccgacccatgggtggaaaagaaattaggggagattggatatacatactctggattaacaggaaaaagcaaagatgattttgggcaagggaatgcaaaatatattacattcttaaatgtattggcaaatccgatactaaaggaaaatttatttgggtctattacgattcgggagaatgaacagcagaataaagttcaatttggggatctattttttaatacttcgtcagagacccctgaagatgtaggcacttgtgcagtattgctttcttatcatgaagagctatatttaaatagtttctgttttgggtacagattgaccgatgataatgttcttggattatatttagcttactattttcggagtagattaggccgccagttaatgacttctttggcacaaggagcaactcgatataatctatcaaaagagctatttaacgcttcccggattatattaccagaaacaaaagatgagcaaatagcgattgctacgatgctgaacgatatggataaagagatagacgaccttgaagcccagcgagataagtaccgcctcttaaaatcgggcatgatgcaaaagctattaacgggacaaattcgtttgacaaaaccactgacaaatgttgtccccttggttccaggggactccgcagtaagagaaattcccgtggatgcccatatttgggctggacatattgttaataggttgtggcaatcaaaaggatgggggcgtacgaagttacaaaagtcgttacatcttgttggctgttatgcacaattagatttaggtgaggagtatatacgcaatactgcaggccctgacgatcaacgactgatgaactatattgaccgaaaattcaaacagtatcgtcatgttaatatagaaaaagagagattgttagatgggaaaatacattatacctatacccctacatctcgtatacaagaggtggagatggcatacgagcgatatccgcaggatattcgcgagcgcgtagacaatttgcttgacaaattaaatttgatgaatttagccgaggcagagattttgtcaaccctttatgcggtatggaataaccgaataattaagggagagcggataacagatgatttgctggtctctgacttttatgcgtggagtgaacacaaagcagactttgaagaaaggaaagtaaggcgaatgttggattatatgtgtaaagaaaatatagtcccaatcggttggggtaaatatattgatgagaaataaactgatatgagtggttatttcttgaaaatagatgggatatgcttttaagaaaatgaggtagaacgaaataatattatggacacaaatatcggggcaaaggagcgtgtaacgcaaaacaggttgatagggctctttaagaatgtcttaaagtacacctgtctcgggaattgggagactcgtgaaggtaacgtcaatatcgaagaaaagttgctcacggcatatctctcgcggtgtggctataccgacaaggagatacggggtgccatcgctaaactcaagcaagcggcaaactctcttggtgggggattatataacgccaacaaggaggtgtataccttgttgcgctacggtgtgaatgtccaggccgaggtgaccgaaaagaaaaagatggtgcaccttatcgactgggcgaacccgatggagaatgatctccagatagccgaggaagtaaccattcaaggcgaaagcgaccgccgtcccgatctggtcgtttatgtcaatggtattgctcttgccgtaatcgagctcaagcgtagtacggtctctgctcacgagggtattcgccagaatattcgtaaccagcaggacggttatattcctcgattcttcacgaccatacagttactttttgcgggtaacgatactgagggattgcactatggtgtaatcaagacgcccgaaaaattctggttgcgttggaaagaaccgtgtggcgagccgtgccagccatcgcattttacagtgggtgagtatcccaatgagttggatcgtagtgtgttgcagttttttgagcccgcaaggttattggaatatatccatgattttatcatcttcgatggaggtgtaaaaaaggcggcacgtcctaatcaatattttgccgtcaaggcagctcaacccagagttcgcaagaagcaaaacggtattatatggcattcgcagggttcgggtaaatcgcttacgatgatttggctggcccgatggatacgagaaaacgtaagtgatgctcgtgtggtgattattacagaccgtgatgagctggacaaacaaatagaatcgggcttcaaagatgcaggggagcagattcagcgagccaagagtggtggtaagctgattgagatgctcaatgctgccgaaccttggttgatttgcacgttgattcacaaatttggcaataagaatgacggcgatgccatatcggtaggaaataagaaggcaagtaagtcgctcgacttgtatcttgaagagttggcaaaatcgctccccgctgattttcgagcgaagggtaatatttatgtctttattgatgaatgtcatcgcacacaaggaggcatgcttcacgaagccatgaagcatataatgggtgacgatgtgatgctgataggtttcacgggtacgcctttgctccatacggataagaaaaaatcgatagagacctttggttcttatatacatagctataagtttaatgaggccgtagaagatggggttattcttgacttgcgttatgaggcccgaaatgtagaacaatacttgggcaaacgagagaaaatcgatgagtggtttgacgcgaagactaggggtttgagttcggtcgcccgggcagctctgaaagagcgttgggcaaaaatggagaagctgtttagcagtaaggagcgtatcgaccgtattgtcgcggatatttgccaagatatgagtaccaaacgggctttggcaggcggctatggaaatgccatgcttgtggccgacagtatttatcaggcgtgtcgttactgggaggtttttcaatcgacagagttgaaagggcattgtgctgtggttacaagttacgatgcaagtactgcatcggtaaaagacgagtatcaaggtgatggagagaccgaggatctcacaaaatatgagatataccaaagaatgatcggcgacaaaactcctgaacagtttgaaacttgggcgaaaaaggagtttacggaccatcccggagatatgaagttgctgattgtcgtagataagttattgaccggatttgatgcaccgtcggcaacctatctctacatcgataaaaaaatgcgggatcacaatcttttccaagcggtctgtcgtgtgaatcgagtagatagtgaggaaaaagatttcgggtatattattgattaccaagatctgtttggagcggtaaagagtgcaatcgaggattatacgaatggggcatttgatggttacgatgccgacgatgttaaaggccttcttttgactcgtcttgccgaaggtcgcaaggccttggaagagtcattacaggcagtatatacgatgtgtgaggtgatacatccgcaaacgcgagaaggttattttgcatattttgtctatgcggagaatactcctgttgaagatcagcaaaatgaatgtgaggggaatgccaataaacgcgaaaccttctataaacttgtgtcgcgtttggtgcgccgttatattgacatagccaatgagatggaacaggctggctatacagcagaggaggctgccgatatcaaaaagcaggttgactattttaatgatatcaaagatgaaataaaattaaaaagtggagatgcgctcgatttgaaatattatgatccagcaatgcgtcagcttattgataactatgtacgagcagaagatagtgagaaattggtggatttagccgatatctcatttctcgacttgattgatacggagggtgataaggcgattgatgcgctgccaaagaaaatcaagcagaatgaacgttctgttgcagagattttggcggcaaatatgcgaaagatgattatcagtgagcgtccgaacaatccggcctactttgataaaatgtctgatttgctcaaccacctgcttcaagaacagaaagatggtaagatccaatataaggaattgataaaacaactcattgagaaactgaaagaggctcgattgaccattaagacaaaatatcctgcaaccattgatacaaaggggaaacaagctctttatgataatcttggaggaaatgaagctttggcactccgtattcacgaaattatcaaagcaaatgctcgcgatggttttagggatatggacagtagtggtctgaaaaagatgagagcattgcgaagggctgttgaaagtgcattgaaaggagtagaacaagataagctcgatgatataatgcagctgatcgttgcacaaaaagaatactaatgactattattaaagtttctaatatatttgcagaagtcgagtggaaggaaattaagaatatacatcttacaatatatccacctaatgctcgtgttcatgtgtctgcacctattggaatgactgaggaggctgtgcgattattcttgattacaaaaatgccgtggataaatcaacgtataacccagattcttggtcagaatcgccaaacaccccgtgaatatgtatctggggagaatcattactttaaggggcaaagataccgtttaaaggttttgtatcataatgctcctgcaaaagtagagattcaggggaatgaatatattaaactatatgttcgagacggagcatctgcagagcgtcgagcggaggtgctacgagaatggtatcgatctgaatttaaatcgatacttgctcctctaattgcgaaatgggaatatcttttaggggtaaaggcaaataaatgggaagtcaagcagatgaaaacattgtggggaagttgtaatcacagtacgaaaaatattatttttaaccttgaattaatcaagaaacctgttcgttgcattgaatatattgtggtacatgaattattacatatcaaagttagattacacaatgaagagtatacagctttactaactcaatatttcccgaattggaaacagttgaaagaagaattaaatgaatttgttgtataaatattactattatgggaaaaacaataactacatacctcattgacggcgatccaaaaggaacgcagtatgcattcatcagcaacaagatttgtcagatgtttgtaattccacgctcgaacttggcctatctgaatgagcaggagaaactgcacaagccggcgttctacatactgatcggagaagatgaggtgacgaaaccgcaggcctatatcggagaaaccgaaaattttaaggaacgggtaaaagaccatgacagcaaaaaagcattctggcagaaagcgcttgtctttgtttcaaaagacgaagatatgactaaagccgacgtgcaatatctggaatatcgcgcaattgtagtagccaaacagtcgaactcgtttgtattgaatgagaacaagcagattcccaaagctccaaatcttcccgaacatcagagagatgccatggatgagttttttgaggatatcaggttcctcgcatcattcattggttgtgacatctttgaaatatcccagccaaaggaagagcacctgttttatacaaaagcccgaggctgtaatgcaaaaggattttataattctgcaggatttactgtgttaaagggtagtatcatcgccaataattgcgttccttcttttacatggaaagcaaagcgagaaaagatggtcgaggagtatgctactttgaataacggtgtttggataatggattctgacaaaaccttctccagccccagtacagccgccgatttttgtatagggcggccagccaatggatggaatgagtggaaagataaagacggtaatacactggattttatatacaggaaacaattagaataacggataatatcaatgtagagtgcagtgatatgattggatttaatttagtgatttcgattttacaaataagttaaaaacgctatgtcaatgaaatatttattgaatagtagtataccataataatgaaaggatacattataaatatacttttccagatggcaaggtatacatcgggcaaacaaggcgtaatcccgcgatacgacatcgcgagtatattagtctttaatgaacgtatatatgaatacggggataaggtaaaggtgataattttatggaaaagtgtagattgcaagcctgaatttttatggaaaagtgtataaatggagtctgattcgttggaaaaagtgagagataataggtattattcgcttgaaaaaatgtaaagctctaaatcgtcatcgacgttagtactcaaaggttgcactatgagtctttgcggtaaagggccaaagtacaaacagaatatgcgtttgcacttgcacttttgcactatgcgtccgcagtttgcttcatttgagcttttctctaaagaaatttgctggtcctcaagaaaatccgtaattttgcgccgtcaattgaataaaaacataaagcttacaatgctgcaaagaagaatgaataactgtaacatcgtatcggatcgaggcataaaatgccttgagagattgtcgtgtgtccatacttcgggtattggagcattctatacttttggagacattttccgacgaacgtctgatagaccatcggggatacgatgatgctggtatcccgctgaaacgataaatgaaaaccgtcggagagtccttaccaaacttttcgacggtttttgtttgatgcctgttggtgacgttcgcacgatgtgctcttctccgtcaattccgtccacgggctgaattgtaatgtattattaaccgcgcagtgatgcgcatgaatggaaagattatgaattataaatttgacggaagcagggttttctttacatccgacacccacttcaaccacaccaatatcatcaggttctgcaacaggcccttcaaggatgtgtcgcacatgaatgaaacgattattgccaattggaaccgcgtggtcggtccggaggatatcgtgttccacctgggtgatttctgtctgggcggttctgtcgaatgggtaaacgtactgaacaggctgaacgggaaaatataccttatctccggcaaccacgacatcaagaacctgaggcagaattatacgaaatactttgagcatattgcaatgcagatgtatattgaggtcgacaaacagaagatttatctgaatcactgtccgttcctttgctatggcgactcatacgatgacacctggcagctttttggacacgtgcatacccgcaggaacaataccggaaaggatgcttcgcggctgagtatgcttcttccgacacaatatgatgtcggagtggacaacaacggtttcacaccggtctcttttgcgcaggtgaaggcaatcatagggaaacagattgaacaatcaaggaaaggagaacagtaagatgaagatacaatacatgagtgatttgcacatggagttccaggaaaacagcagatacttgaaaaataatgaattgcctgtaacaggcgatgtgctggtgctggccggggatattttctatctcagggataaggttgctccattgactaagttctggaaatgggcttcggaaaactaccgacaggtgctgattgtccccggcaaccacgaatactacaactattccgacgtgatggaacggggactgcaatggcggtggatgttccgtaaaaatgtcggttactatcaaaatcaggtcgtccgcatcgatgacactgacttcgtcctgagtacgctgtggtcacggatcaacccgaacgacgagtatttcgtgtggaaaggcatgaatgacttccgccagatcaagttcgacgggaagctgctgcaggtggatgaattcaaccggatgcacgagaattgtatcggttttatccagaaaagcgttgaagaaagtacggcggcccatatcgttgtggttacacaccatctgccgacactccaggcagtggctccgcatcataagagttccgtgctgaacagtgcctttgccagtgaatacggagaactgatagccaacagtcggattgatgcctggatctacgggcattcgcatactaatatcgatgtaaaaataggggatacccctataatctgtaaccagatgggatatgtttttgaggatgaacacctgatgaacggatttgacccagctaggtttattgaaatttaatggacatatagaatgaacgaaagaaagattatagacagaaagctcctttccgatttggcgacggaggtcaggctgaatgcctcgcatttggaggcgttgggagaaagccgtcaatgggagattgtcgttggtgtcgatatgcttgagcggatggttgagatacaacatcagttcgagcggctggctgtaatgggcgacgatgagtaccggggattctatatcgaagtgccacggcctacgccggaagagtggggggacgccgaggaattgatcgcttcgggggaatatgatagccgggagacgttccttgcggattggcttgcattcaacccgatggaggccaggtggtttcatgtcgcttcgaaccgatacggagactcccggtcaatccgtattacggaccggaagcatactcattttatcattacgaatcgttccaagtgtacggatgcagaaccagatgatacgtggtgcagggagaatctaacccgcctcttcgactatctggaacggatgattgatgtcattgttgcgaatcctgatgggttcaacgattacgtagcgcataacctgccgtaccagcaacgtataggacggattgcacaaagggagtttaaccgtatcatgccgaatttcaaaattgaggtggaagatcgggaaacggccatcaaggcattggaggactcggtacacgggctttctgcccctcttttggaaaccatgaccatacgaaagtattgcgcctatttccgcattgccaacgaggtgtatgaaaattatcaccggaagcggggattcagggggcgcatccatacagatccacaggatgttcctgaagaactgcgtgatatggtctattacaaacggaagaagttcgtggatgtgatggaaatgtatgacattgacagtccggaggatttcatacggttcgcaactgaccactatggtgaactgggcctttcacgtctgaatatctttgcctcaaactaccggcaacagggatggaaaattgttgtttccaacagttattcggccaatgccggattggccattgaagtggctacagctttgtataaggccggagcaccgctgctgatatacgacgccaagaagctcttaaggatcctgctcgaagaggattctgtgcgtctggttccctactcttatcacaactatatgggctatcaggaagagggcgctgtctacgaactgccgtgggaatacgagtgttcggacgatactaattcagttctgactaaggaacaatataaagagattgtatctaatgcagaatggcaggatatagagcaggtgaaatggtagattcgaaatgggttatgatttgccaaatcgcataaaatattgctgatttggcaaatcatctttgttcccgtttaaatagatctggaggcagattaccaaaaaactgtatcggtaccagcaaagcggattttcctgtaaaactatccgactgacaagatgaattaatattacttttgttataattaaaacttagaattaaccataatcaatcacttttttattatatggacacagatcaattgtcagttttttgagctgttcatccgaaagatgcatatttttcaaaaggttcaacagttcttcctggcgtggttgccccagtgtcatgcgatacaaggcaagcaccttgataagacgttcgtatttatatcggtcacgactgagtggataaagcggaacaatccgttcaatgtattccaattttttccgttgctcttccgtcagctctgacacaggaaggcaccaataaggaacaatgtccgaatgtgtacctttcaaatttgaatgtgccatagagaacagttcatcccacggatgataagtttcactgccatacaattttaccacatttctacgaatggccaggcacttaaaacggttgatacgaccttcacgttgttctaaatccactggattggacggtagattccagtgaactatctttctggcataccaatgaaaatcaagaccttcctgaccgatagaggttgtggaaagcaggaaagggcggaatggagagttgaatgccttacggatattggtagtatgcgcaaccgatttatcagtaattgttttgtcaatgaatggaatagcaaaatgacaacgcataagttgtttcttttcttccattcccaatgaatcggttgtatctatgctaagattgcttgtgccaataatagcctccgtaacagtgtgtcccaacatctttgtttgtgtcatgtgggcatattcatcaagtacagcctgcaagttccccatcgcacaataatcaaggaccgattcgtaataatcatcatcgttctttttattgtatatcaagtctatcacagctgcactttcaggcttgttgaatacagagacaactgctttggccaccatctgggcatcttcttcattgccagattgccgataagcacataccgctggtgaagcgatggcaatatccgtcatcacatccaatgcatttgaaggtacatacaagccggtcaaatcttctactggctttccatccagtattttcatgagcgtaagaacaagtctggcgttatttcgcccttgttgtggaatggtacgtataagcgaattccgcgcaaattcttcttgtattttctgtttgataattttccggattgaggaaagtttttctccataaaatgttgcaggagagaaaagactagctaaagtttggcaaggatactccaataatccatcggctcttaaacgattctcgccgtaacggttcttcttttgggaagtgtagcgtatctcaggtattgttttctttaattctccgaaagtatataactccgaataatatgacatcatgatggaaatcattctcggtaccatctcccatgaagagaataggataatcttggagaagttacgggcttcgctactctcgaacgcacctccggccttatagtaaggattggaggcaggaacccaaagcaacaactgtgttttcttctcatgacgtactccaaatacgaggtcgtggagatacttcaattttccattggcagcaggaatgggacgataattgttgatggcataccttgatagaagcaatgcatctattttgccatatttttttacatctgagtgtgataatgccgaaacaattcgtttcttcagttcgtatttatccataaaggacaacaaatagggtgaagacttgacgtattccatggggagattacccaaacgcattttcgtattttcatgatttaggcaatccatcagatactgcccctctgcaaaagaaaggatatcttccggcacgacctgcacgtcacatacacgggaatcgtctataatgccactgttgaatcgttccgtgcggcacatcaccccatacagtgcttcttctgcttcattcttggttaccacaagcggtgttaaatcaaccacatctgtacgtttgagtgcggcagaataggtgtgccatatcaacttgaaccggtctgctttatcttttgtggcatataggaaatccattactttcataaagtcctgatagtgctcatcattcccatttgtatttaactcttcaagggtggaataaggtttgtagggcgtagctgaaagtaacagaattttcgtattagatcgttcatcatcaaagaatttgttggtcagcatggattgctcgtcatcgccttgttcaagcaacgaattgaagcgttgaaattcatccatgatgactaggtccggatcgagcatatctatactgatttctgcaaaaatacgacgtagcttattgatcatgtctgcctgttgacgattgtcataaccatactttgcatacccaatcagttgattgatgatagtatccgacaaactcatctgtaacttaccatgcatttcacgaagataatcatctccgcacaattcgattctgttgctatatatatggataagctcctgccagttttttacattacagctaagaaaatcactgataacttccttatactctttaaattgagttagtccgcataaaatatcatacatcaaggcacgttcattggccgttccttgcgcactataaaaacggaaggaagtcgaaggtgtcagcggaatgattgattcaggcatttcttctttctcatgctgttctgcaatcagtttttcagctaatttgatatagagatgctgcattgacagacgactctcactgatactcattcgattttcaacacctaatttctcaatgttttggtcagctatgttggcatttgaacaaatataaaccaccttaaagaagtcatctttcttctgtttgtgccattcacggaccaaattgatgacttgtttggctacgaatgtcttgcccaatcccacttcgtctgctagcaatacccgtcgatgacctaaatttttatatatatgcagaatgcgatctgctgtagcacgctgaaaatcttttacttcctgattcataagcgtttgatttgtttaagaacgttttcaaatgttttgtacatctccatgaaatggtctgggataacggtctcgtctgctttctcaacgatttgtcggatagaagcgatgcggtcagggtctttataggccattttcaccatgtcttcataaagcgaggtactgatttgctgttccaaagaggacgttttgtcattggccagttccttttccagttgttggctttctaatatatactgttccacctcatcagttagcatgaatgccagatagttgatgaactttcctttcgtattgataaaggaacggaatatcgccttgtcccgttcatctgttggcattccttccgtatgtatttttatcaggcgacgcaagtctctaattcgtatcgtgtaaaactctgttaatgaatccagtggcatatctttaaatatcagtccgtcagccaatacttgttctttaccgtcacatcctaaaggataaagaaaaacaggttctgaaggcattctgttagtctggcattgtatggtaatggtatagcttccgtcattaaacctaacttgtgcctgcagaatggccgaaattgcttgacgcagcatcaattcgttggtgacatcctcttttccaccatcttcctccggtacagaaatgacctgctcgaacatacattccttgctgtcattaatcagttcactccgacatttttcatacgagaatttatagggcacaaacttcaagtgcagtaaaaactccacattccgtccgaatccattcatggtggcattggtagaaccaagatacagatggttatagctggaattgccatcgtatcggcgaatgaaatacactttctcgtgcaagtcgacaaccacatctttttccaccttatcggtcagtacttctttgggagtgtaaacaccgtcattaaacaactttattgcctctttagtaaccgaatcatgtcgtgtgatgagtgtcttcttggcgccaggactacaactgaccatctgtttcaagatattcttgtccaagaaaggagaaatgaccaacatttctgccgcatgattcagcatactttgttcaaagcactttgtatatccatcatatccaggtatccccatagggaaaaactcgtaatcctcgaaaggagaatcggtaaggtcaaatcgttcaatgtagtcgatgtccttacagatagaatgcatatttttacggatagtacggttaccggcttttgcgattaaccatgtgagaaagtctacaagtggtgtatgtttgacttgtgctttccgagtagccggtttggtaccaattttaccaataagttcacatactacgtccaagtcattggaaccggtaaggttacgggaaaggacaattagtttgatttgctgagcatcggtgtccgggttcgtttctttgataatccataccttgggatgaaaattgacaaaaccgcccccttttgcttgcagtgttacttgtacaatgctctgctccagaagtgaatacactttggaattggcttgcggtactaccatgcatccagcattgcagaaaacagcaaatttacctgccgattgattgatagtctccagtatcaggtgaggagagtgcatggccgtttccgtcaagtcggtcattgtgcccaacataaagggtaccgataacaaggaaggcatgtccaaactgtaggtagtgcaaaccgcataatcaattacaaagccatcgctttgcaacacatccgtatagacgatatcattccataatgcgtcagccattgattgcctcctttcttaattccttggcaaaggtttttaccgtttcccatcggtaggttagtttatagtagtgtatgcgattcttcttgtcgtaaatatatgctggatttccaatttttcttcgattcccttttactcttcgttcccggttgataatcaaccgatccaaaccgccatcttcttcaatgtcattggctgcaatgcgttccgcaacttctttgcagaaccattttccgctgttctctcgtatgcttactgcattcagtaccttgtctatgtctgtactactattccggtattcttcaagtttttcctgaaattcgattcgcatttcttcatcctggtattgcgaatatatatagttatagcggatgtgtaccatatatatgaaatctgcgaagcgtcgggccaaatcttgcaattctccaatctcctgtggcaaatgacggaaggggttctgttcaaaactatcggctatcgcaaagtctggattatccacgatgtaacgtaataagcttccttgacatgcttctgcgttcagaatgtgatccacaatgaagtccttatcctctacagtcagatctaatgtacatttttgtgtaaaatcataatacacattaggaaaagagcagaactggaacaagcctgacttctcatctgcatcgtcattcgtatcttcgtcatccgtcttagtcaccttaggcccattgtgcaaggcctttgaagtggaatagattaattcatacaactgtggactgcgtaagatgccaaaagtctgcaacccagaattgtagatgtatgccggatcatattttacgtaactgtttgtatttttaccaatcatttctcgtcctgtaattcctggagtattatttccttcacaaagattctttgtcatgatgcgttccagccggataatttccgctttcacctccgataaacggttatatcgtttttctgtagccttacgatagagttgtggcatgagcgagaaatacttcatgtgcttttgcagggtagatattccgggaaacatacggtctgcaaaagcatcacggatacggccaatgccgagttcatcgagagctacagattccgaagtcattttcagtacttgcatgactcgggtttgttcttctcggttgctgtgtatatatcctaatttcataaaattgctaataatgatttttttatcgtttcctgattcactgtatctgccgtggaaatgcgaagcaggtgaagtcctaactttgtgaatatctgatttttcaacgcatcacgtgattgttgggcgtcattctccttatggaaatgccatccgtccacttctatggcactgattggctgtttggtcagggaattatagagcaggaaatccacatgtgagaatggactttcgacaaacgctttttctttatcttccagttgattccagtcggcaataagtctggacagtggataatgacaaaatactcccgtatggagcaaacctaattcagcaatggcttttaacagaatatcgtatattagattctctgataaatgttcagagacggcaggatgagcagcttcgtaagccaatctttctgccgtatattgctgataaagcaaatcaaaaacagaatgcaacttactggattttacctcaaaattgttgtactgaatataactgattagcaggctgagattggaatcctctggcatttcatttccgtttgtaaccagacataatttggttttagcacgtgaaatggccacattaagcaaattggcgtcatccgaaaattcggtaggatagttgtccaccatactcataatgatggtgtcacattcccgtccttggtacttatgtactgtactggctatgtcttttccgacggttttgttgattgcttcagcttgtgcccgatacggagtaataatacctatactttccgactttgcacattccggtaatacctcttgcgtaatgacatctatttctcgttggttgaaatgtcctctggcatggttgccgggtacagttcgaatcacttgcaatacatctttttctccttcgtctgtagtcatggcaatcagttcttcattgtaaaagtgttgattacagaactctataattttcggatggcaacgataatgttctctaagcagtgttactggcgcatcccgcaatatttctacgcacgattgtaggaaactgtgtgtgattgcattgtatcggtcgtccacttgatatgtggtctgaatagccttcaacgctaattcttcttctcggcctaccacattgggtaactgtttgtcgtcacccacaattacggcgttcatggcacatgatagagccagagcccctgtcttgatatccacttgtaaggcttcgtccatgatcacatagtcaaataccatgtctttactgatacagcttttggccgaataagtggtactgagcacaaccggatattctttcagaaactcttctgttctgggcttaatatctttgattgtaaattttttcctttgtccggtattataccgtttagctatcttgtccttcaatagttgcagagaagaggagcgaagttctttcatactcttctggatatctatgctttggagtgccgaagcaatcgattctagctcttgctctaattctgtttttcgagaaaagtaataagccgactccaaactgtttatgacatctgtcgcttttctatttaaaaatgtcaatattttagttcctaatgagaaagcccattgcaatctgaaccataaacctggcttatgtccgttctcaaccatcgtctgatagcggttgagcaatttcataagtttagccgatggtttgccattcaaccattcatcttctgtttggttgtcttcccgcatttcgttgtatttcgattcttttaatagggcatcgtattctgcctttagtttggcctgcttgagttgagcatcaaatccttgtgaaacggcttgaagtgagtcttttgccagattctttgtagttgtttgttcatcaatcttccaacctgtcatagcaggatgctctggctggttggcgatgaatgtttctttgttttgtacactacccagtttggctacaaggaagcctaatccttctccgtttagtttctcagctacattctctacagctgagttattgtttgatacaaccaatactgttttacctttcatcagcagattggcaataatattcagtattgtctgtgttttaccggttcccggaggtccctgaataacgcttacctgatgtgttaacgctgcttctacggccgctttttggctggcattgcatccaaacggataatagacatgtttgggcatggagtaagttgccaattttgttttgtcacctaggtattgagccaagggaacattgtcacgcttcacatctaccaattcatattgtttggatagaatactttcatcatcttcttccgtaatcagacctgtttcatcagccagtttgcgaagataatcccaaatagaaccttcatttttgtcaatcggagtacgggtaatatagacctcgttcccttccagattctcatagtagccattgttataggtcactcgataaaaaatgtagtgaccgtctgtaaaacgtagtaattctgcaacattgttaatatgtttattattgatgtatagccctttttctccaagatttattgtatcaggatgtgttagataaagtaaacgtgagggattataattgaatagacgtggtgatgacgaaaaccgaacagtccaaagtccattcttgttttggtaaatagaagaaacacgttctgtaacaaatatttgcttgtcaccgcgtttctctaaatctataatcatatacagttttgcgtccatattatttcgaatgagatactaataatcgaattttgaggctgcgacggagaaatcatagcagaaatcttgcttggctatgcgaataaatcaggccctttttgctgtcgctctataaccctaattttttctttaagtcctttatcttctttataccataaagattctttaatcttaataggggactccatcattctttctatctcagctacagccttcatgattagatctgtactacatatcggtatttctccctgaggggcatacgaagcaaggtattcttcagagggattatatattccatgtcgtttacatacaagccatgcaacagtctctgcttcaaattctcgttcttttatggttaatttccgtctcttagattcagtataaaattgatgataacaaaataaatgtcctaattcatgacagatagtatgaaattgcacaatcctttcctgatttctattgacacttattataaaacgagaatttactctagcagattctttatttacgatgcagcatacatagctgcttgaatgatagattattgcaatttaatcggtagaaaagttgtttttgagacctctgagacttattttgaggctgtatcacacttttttctcaatgaatcagaaccatgaggaaatattgtgtcctcaatgaagttcacctatcttctatccgactacaaaggtacaaaattccgtgatgttttcgcctatagtgtcaactaaatgcaagatattttcacggatattgtgtgctgaccaaaagagaaaaatttagttgaagccttttcttccctctgcttgacttagctttattgcccgtgtgtataataacggccattaaagtcaagttgagagtagagttgtatctttttcttttggcaagcaaaaattctgttattggaaattttcgaataactgaaagtgttaagccacaacatatcatataatatgcaaacaggcgtatttttgtttactatatgatacattgaggctttaaagcgtattgctgattagcttgtgcatttcacaagacaaggtacttacctgaatcaaaaccattggcgatatgttcgttttcaaaaacatatcccatttgattgcacacgaccttcgtaccgactatttcagcatcaatattggtgtgggaatgcccataaatccatgcgtcaatgcgactgtcggcaataagcccactcagttcagttgcaaatgcactattcagcactgaacctttatggtgaggggcgacgacctccaatgtgggaagatgatgtgttactaccacaatgtgctttgcggtgctttcagttagactatgcttgatgaaatccaagcagaattcatgcatctgattaaactcctcagtttggagtaatttgccattatacattatttgccgaaagtcgttcatgcctttccatataaaatactcgtcagaaggagaaatctgagaccacaaagtgctcatgataaaatcagtatcatcaatctttactacttgattctggtaatatcctacattcttcttgaacatccaattccattgcagtcccttatccatcacatcacaataattgtaatactcatggtttccgggcacaatgagcacttgccgataatttacagatgcccatttccaaaaatagctcaaaggtgcaaccttgtttttcaaatagaatatatctccggcaagaaccagaacatcgccagttacaggtaattcattatgtttcatccacctgctgttatcgctgaattccaagtgcaggtcgctcatatattgtatcttcataatcttttgtttattaatattttgtataaatcagttcataattctttgaattcgattcattgaaaataataccctccaagaaagaaaatttattatacaggaattggtagtattcaagttcttcttcctcaaagtctatgttctcatagcagttgtctatctccttgttgattttatcgtacaaatcgacggtcgttttggctattcgtacttccaacttggcaatatcttctttattcttagcaatagcctttttacaatgttcgatttcttctttgtaaaagcataaaacctcctcaagaaggacgtttgtcagcacacttggagatggactacatggaagcacagtcaattcacgacttggggtagtagtaagataaaacaatttacaccccaaagactctgcaacctgtttgttatattcatctatttcgcgaatgactttcatcaaatcttctttagattgactttggcattcttcatgagacggatgctctttctttttcaacaaaggcatatctttgtgtcttaaatagaccgttgtatattcactcatacataaccctccttttttatttcttatgaaattgctctacttgtttttcaatcatcctttttacctgttcaaatgatatgggtgtaaagttattgttatcaacccctacatcgtattgcatcggatagagatactgaagcctggctgcatctataccggtgttgttcttccttgtgtgaacgtgcccgaatagttgccacacatctttatatccaccatcaaaacatagaaaaggataatggttcaaatatatcctctgcttgccgacctctatgtgcatctgcattgccacatgttcaaatctgtcaatgtagccttggcgtatattcttcaaatcgtggttgcccataatcagatatatcttgccgttcagcctgtcaagcattttagtccattcagccgaaccgccaagacagaaatcacctaagtgaaaaacaatatcatactgtccgacagtattattccaattggatatgattgtttcattcatcatttccacatccttaaacggcctgttgcagaaacgaatgatattcccatgataaaaatgggtatcagatgtaaagaacaccttgctgccatcaaatttatagttcatttcttctcaatttatgtgcatcactgcacgttaataatctggttaccaacagcccatcagacggaaatggcagaagaacatcataaaggcgactgtcacaaatgggcatacaaacaaaatagttggaaagtttggtaaggactctccaactattcagtttctattctctcaaagtacaataatgtactcgctatgtttgttggaaagtgtttactatacgaggttcaatgcgtgaaacaagaacactcgacacagattcagtgcgtttgttgctctgaattgtggttgttgttggtaatatgttcattctgtttctttgcattgttaatgttttattgtctcaaaagcaatgcaaaattagtaaataaatcccattctcgcatcacttttcattaaatttttttgccaaaacactatgatataggattttattttttcgatcatgctcgcaaaccaaataaaatatgtaattttgcatttgacgcaatctataattgaatacaaaatggcaaatttgaactgtataaaggcagtattagcagagaagggcattatgagtaaatggcttgctaaaactttgcagaaagatccggcaacggtgtcaaagtggtgcaacaatcattcgcagcctgatttatacacattggcgcggatagcagaagtgctggatgtggatattcacagattgatttgccatacaaaagaagaatagaggatatgaaatatacaattgaagaaatacggcatatgcaggaaggtcagacttttgactgtaaaagtatcctcattgagcctaaacaccttgccactatcatagtcgctatggcgaatgcagatggtggaatgattgctgtgggtatatccgataagactcgcagaatagagggtgttaaccaggacaaggaacatctcaatgatatattgcggacacctttggacttttgtgttccatcagtttctgtcactacggattatgtgccttgtacggatgctgagggacgtgataaccgtgtattgttgatgcacattcctgcaagtccgcgacttcatgcgaatcaagcagatgaagtgttttggcgtgtaggagacaaatcacgtaaactgacttttgatgagcgtttgcaactcatgtacgacaaaggggaacgctattacgaggattccacagcatacgatgccacacttgatgacatagatatggatgcagtcaaagcttacatgaagcggattggctatggcaagtctgcaatggagtatctgcaagaaaacaaaggttttgtgacctataaaggcgatgtgccgcaagtcagtgcagcttgtatattgctttttggcaagcatcctcaggcattctttcctcgtgcaagagtgcgttttatcaagtatttcggtacagaggaaaaggtgggacgtgaaatgaatgtcatcaaagatgttactttcgatggtcgtattcttgaacagatacagaaaaccgtcgaatatcttgaaacgcaggtaaaggagcattcctatctcggagaggacggtatcttcaaaaccgaccgcgaataccccaagtttgtgatacaagagatggtggtgaactccgtttgccatcgcgattacagtattaagggaacagaaattcagataaagatgttcaatgaccgtcttgtattcgaaacaccaggcaagttgcctggtattgtccgcactgacaacattcgtcatacccatttttctcgcaatccgaaaatagcggaatacctcaaagcatacgactatgtaaaagagtttggcgagggtgtagaccgtatgtgccgagagttgtctgcattgggtgtcaaagagccgcaatacaacttagttgcctttatcatgaaagcaacagtatgtgctaatattttggaagaagtacaagaagctaaccattccgaccagaagcgaccagaagccgaccagttagggcataacaagggcataacaggggcacaacaggggcataacaagatactttctcttattgcagaaaacccacaaatcagtatttctgcattggcgaaacaatgcgaggtctcggagaaagcaatgaggataacactggaacgtttgaaagcagagaatattatcaaacgagttggtccaagttatggtgggcattgggaaatccttttatcaacctctaaagaaatcaaataatacgaattatggcaaaaaaagcaacaaataagaaagagaaccttccgatggaggaagtgctttggaaagcgtgtgacgcgttgcgtggttctattgagccaagcgaatacaagcatgtagtgctgtcattgatattcttgaagtatgcaggtttccattttgacaaacgccgccgggaaatcatcaatgacgggcttgaagactttgtggatagtgtggagttttatgcagccaagaatgtgttttatcttccggaaacagcgcgttggacatatatcaaggagaacgcgaagcagcccaatgtcgcttcaatcgtggataaggcactttctgacatcgagaaagaaaacaaacctttgcgtggtgcattacctaacaattattatagttcgttgggaatagaagctgaaaaactcggttcattgctggataaggttgatggatttgatacgattctggaatccgcagacggcaatgatattattggacgtgtctatgagtattcgaattataaaagattgggtaattatatccggcaagttgatgtgcgcaatcgagacttggttgtaaataaactgcttggtttaagcattgctaagcagtttatcacatccattgcaaatacaacggggactgatatgagtacatataaaatagtccaacctcgacagtttggctatgttcctgtaacttctcgcaatggagataaaataacaattgctttgtatgagggggaatctccttgtattatttcacaggcttatattgtttttgaagtcattgacgaaacagaattattgccggaatatctgatgatgtggtttcgtagaccagaatttgatagatatgcccgttttaaatcgcatggttctgcgcgtgaagtctttgaatggagtgagatgtgtgatgtgatgcttcctgttcctcccatagaggagcagcggaaaatcgtatctgaataccaggctattgagcagcgaatagagaacaaccgccgattgataactacgcttgaagaaaccgctaaagctatctatcgtaagatgtttgtggatgatattgaccctgaaaatttgtcagaagggtggcggatgggtaaacttggtgaagtcattactatatcaagtggtcaatcattatccgacaaggttgatatccaaaccgatgactataaatatccagttgctggtgcatcaggtattatcggatactctcgttggcataatcaaaatgaaccgtttatcactacgggtagagtaggaacgattggagtggttaatcgatatttatcctctgcatgggctgctgataacgttttagttgcaaaatcgccatactatgaatatgcctaccaagttctaaagaatgtaaattaccaaaagttaataggtggtggtgtgcaaaacctgattacacaaaccagtcttactaatattgaaatgatgattccgccattagaaaagatagagttatatgtaaaatcaattaatgggattgcaggactttcgatttgtcttgataaagagaactggattatggaatgtttacaaactaactttctctcaaaactttcaaattattaatatatgcagtttttatttgatttagattcaaaaggctatctaaagaggagagaaagtgccattttggaatacaaacaaaattttcaaaaaggggacaatcttctaaagtatcttaagacccttgttgggatggccaataataagggaggaatgattatgtttggaattcaagattctccacatattccattaggtatgtcaaatactagattccaagaaattgacccaaaagaaattgatggtcgtctgagagaatattttgctccttcaataaagtggcggtctgatattcttgaaaaagaattagatgatggtagtaaaaaaacttttggttttctaatcgtagaagaagcagaagaaaaacctattgtttgtaaaaaatcaaaggataatattttgcgagagggggctatttattatcgttatagaggtgaaacaaaagagattgaatatccggaacttaattcacttcttcagtgcgagagggaaaaagaacgcattctttggataaagcatattcaaaagatagcgttggttgggccacgtcaaataaatatactggacagatacaatggtgaaatctcttatggtgataaaaaagttttgattgataagaatttggtggataaattgaattttattcaagaaggtcattttacagaaaaagaaggagaaggacttcctactttaaaattagtcggtactattgatggattaatagatgttgatgatgcggttattgatacaaacgctgtatatccattaacaacaaaagaattacaaatagagctcaatatcaattcttaccaaatgcaagcaattatctatgcattagatataaagaataagcctaaaagacatacagaaatttatcatggtgagaaatcaaatcctatacataaatattctcaatcagtaataactgtcgtaaagtcactatttgaaaagcatggtaaggatatttttataaacgactgtgttgctaaatacaaagcaaatcttgcaacaaagcctaaaaagaaaaggagaaaaagataatgtcttcattccacgaatcacaattagagcaagcatttgtcgagcttttccaaaaagagggttacgactatgtgtatggagaatgcattctgcgtgatacacgagacgttattctctacgatgatttgcgcttttatctgcggaaaaaatataaaaccgaccatatcaccgaggatgaaatcaatcgggtaatcgccagattggaaacttcagatgggggtggtgtatatgcagagaatgtagaagcgttgcgacttctgcaagaaggtttttcgttgaaacgaaccaatcctaagttaccaaatcttcatatctatcccattgattatacagaggtggataataatgagttgggaaagaataatatatttaagttcgtcaatcagcttgtcattgacggtgagcatcatcgcattcctgacggtattgtatttgttaatggtctgcctttggtggtacttgaatttaaaaatgccatcaagcaaaataccacaatagaaaacgctttcaagcaactgacggtacgttataggcgtgacatacctaaattgttccgctataatgcgtttgtagtaatcagcgatggcgtgaacaataaagtcggttcactttttgcaccctatgagttcttttacggatggcataaggtggaagctacggattctattcttgatggtgcttttgatactatgttcacgatgatgcgcggattgttcagaaaggaacgcctgcttgatgtattgcataactttatctatttgccagatactcccaaggacgaggataaaatcgtgtgccgctatccgcagtattttgctaccactcaactgttcaataacattctgaaacattcacgcttgaatcctgatggtgatggaaaagggggcacatacttcggagctacagggtgcggtaagtcgtacaccatgttatttcttgcccgacaactgatgcgttccaaaaaattgagcagtcctaccattgttctgataacagaccgtacagaccttgatgatcagttgtctaagtcgtttttaaatgctaccaaattcattggagacaagacaatcgttcaagtagaaagtcgggagaaacttaaagaacaccttgaaaagcgtactgccggaggcgtttatctgacaacgattcagaagttcgaggaaagcacaggcttattgagcaatcgtgcaaacattatctgtatatctgatgaggctcatcgttcacaagccggtttagggcagaaaacaactataacggaaaagggtgtaaagcatcactatggttttgccaagtatctgcgcgattctcttccgaatgctacatacgtaggatttacgggaacaccgcttgataatacgctggatgtgtttggtccgattgtagaccgttacaccatgaccgaagcggttgcggatgagatcactcgtaagatagtctatgaaggtcgtgctgctaaaatcatgattgactcggttaaggtgaaggaaatagagcttttctatgaccaatgtaagcaagaaggatcaagtgactatcagatagaggagagcaagaaaatgatgactcggattgatgttatcctgaatgaccctgatttgcttgccaaaattgcccaagatatagtggaacactacgaaaagcggattgaggaaggttcgacggtgttgggtaaagctatgattgtgtgtagcagtcgttccattgcttggaacctctatcaggcgattatccatttacgaccggaatgggcggaaatcaaagaatgtattgaaggggaaactctttcggagaaggaacgcaaagaaatcaagccgatgccgcgtattgctatggtcatcactcgcgacaaggataatgattctgacgaactttataatctgctcggcaatgatgaataccggaaaatgttggacaaacagttcaaagaagagaaaagcaattttaagattgcgattgttgtggatatgtggataactggctttgacgtaccgagccttgatacgatgtactgcttcaaacctttacaaatgcacacgttgattcagaccatatctcgtgttaatcgtgtttatcccggaaaagagaaagggcttgtggttgattatctcggcataaagcagcagatgaacgaggctcttcatcaatatggtggaaatggagatgtcgatggcccggatctcgaaactgttgaagaagcggtaaaagttgttaaggacgaattggatgtgattaagcggatgtttcatgcttttgactggtctggctattttattggaacgcctcttgaacagttaggcattcttcaaacgggagcagaatacattcaacataccaaagaacttgaaactcgttttatgcgacactgtaaaaagatgaaaggtgcgtatgatatatgctgcaactcagaacatctgacagaggcggaagacaacgatattcattttatgttggccatccgttccataatctctaaactgacgagagataatgcaccggatgctgtcaagatgaataagcgtgtgagcgaaatgttgaaagatgccttgatgtccgaagcggtggaagaggtgactaaaatcggtgttgctgccgatgaagaaatagaccttctttcatcggaatatatgcaacgtcttgaccaaattccctacaaaaacaccaaagtcaagttgatggagcaacttttgaaacaggttattgaatcgttgcggaaaatcaacaggcaaaaaggcatagatttcacgaaacgcttggaagatattgtcaaaaaatacaatgaccgttctgatgatgctgcacttgccaacgatgtgattgatgatgtcgttggagagatggttagacttatggaggatgtggcaaatgaacgtactgccggcaattctatagggctatcatttgaagagaaggctttctttgatattctgaaatctgtggcggtaaaatacgatttcattgaaaatttctcgaatgagaaattgacagagttggctaagcaaattaaaacgatggtagaggaacagttggatgtttcagattggttaaaccgtcctgaccttcgggcgacattgaagatgaatgtaattgtcctgttagctcgtgcaggatatccacctaaaattcgtgatgaggtgttcaaggagattttggaacaggctgaaagtttcaaacggcacagtcggcctcgcccttatgctattgactatgattcttattcatcaatggtggcagaaccgtagtatgaaccaaataaatacagaacgattaactaggatttttattttagacataaaaaatcctcaataaaggaagtaacagtaatgaatagaatagtacttattggaaacggctttgacttggcacatggacttcctactaaatatgaaaattttataaactggtattgggagaaacgagtaaattcttttgcaggaaatcttacatctatatcagaggattgcctttgttctatcaaaatcacttcagacaattataatcgctgttggaatgtctttgcattttgtcttcctaagtttattaacaaaccgtccggtaaagagattattgatagtattgccaatgattcagaatcttttgagttttcgttgcctccgttttttaagaatatatgtacttgtattgaaactaaagggtgggttgacatagaaaaggagtattatgatttattgcgaaatttgattgtaagtccagacaactgtgattatgcaatttcagaaatcaataaacagctacattatattcaagaacttttagctgaatatctttcttctatcacaactgataatataaagtgcaatgcggaaatactacgtcaaatttatggaaatattcgtaaagatgatattagtatttcgcaattacaggtttactatgactatgcagattatctaatccaacaagacaatgtgtatcaacagttgctttgtagatatggttttgaaggtagcgacaggcactttatggcagaggatatcaaacaactcagaaagcaatttgtaaactcgtcagagatagaagacatttacctaaaggatttaataattcctgagaatattatgctacttaattttaattatactgaagtagcagacaagtatgggtatctgaaagttgcatctacaaatcatattcatggagacttgaataatcccgatagcataatatttggctatggtgatgaacttgatgaggattataaagatttccttaaacaatcagataatgagtgcttaaggaacatcaaatctataaagtatttagagtcggggaaatatcgtaatttgcttcagttcattgaatctgctccatatcaagtttatattatggggcattcttgtggcaactcagaccgaacgctgttaaacaccttgtttgaacataaaaactgtgtttcaataaagccatattattatcaaaaagatgatggttcagataactatctggaaatcgcacaaaatatatgtcgtaattttacggacatgaagttaatgcgtgatagagtcgttaacaaaatgttttgtgaaccattgtcacaatttaaatgattttgttatggcaaaaaacatagaaatacgaaatagtacggcagagtttcttatcttcatgcttgaaggcaaggaggatgggattcaggtgatgtataagaatgaaaccatctgggcaacgcaaaaggcgatggcgcagctttttgatgtgggagtacctgcaatcagcaagcatcttaaaaacatctttgagagtggagagttggttgaaaattcagttatttccaaaatggaaacaactgcttcggatgggaaaaactataacacgacctattataatctcgatgccattatcagtgtcggatatagagtcaattcggttcgcgccactcagttccgccagtggtgtacgtttgtactccggcagtttgctatccgtggatatgtgattgatcataagcgaatggagaacggggctttcttaggtgtagattactttgaacatttgcttgccgaaataagggagataaggctgagtgagcgtcgtttttatcagaagctcacggatatctatgctacggcaatagactataacaaggatgctccgacaacccatctttttttcaagaaggtacagaataaaatgcactatgctgtgcatgggcatacagctgcggaattgatagttgaacgagccgatgcaaataaggagcacatgggattgaccacttgggaaaatgctccgaatggaaaaattgtcaaaactgatgtgtctgttgcaaaaaactatttgcgagaaaaagaattggaagaaatgggcagaatagtcaatgcgtcccttgatatggcagaaagtatggctatgcgtcatatacctatgacaatggaagattgggcaaagcgaatagacaaattcattaatttatttgagagcccgatattacaggatagcggaaaggtttctgccgaatatgccaaagagtttgctgaatcagagtttgaaaagtacaggattattcaagaccgtcttttccaatctgactttgatagatttgaagataatagtcttcctgcattggatattgaataattataatgtcattttgaggttggcaaaatcgcctttgggatatggcagattcatgtcgttaaattggcaagcgttcgaacaatagttctgtgttcatcatctagtatctgcatttatggtggccgacgttactccaggataccacttaaaagcaagaaaagagttcacataagagttcataaaagaaccagtagggttcataaaagagttcgtaaaagcactactgaaatatgcttgcctatggtaattgtcaaacagaggctacaaggatattacaagcccatccaaaacatgattgcgtggagagttaaggcattttataatcgcaataaagccatatcctgcttgcctgggattggcaacttctcacgagcgatttattgcttggggtattgagttaccctaactcaatagaggtcgtataatgggcaagcccagggcgtaattaagtgtgcaaatttcgcttttggtcgagaaagatgaggatgaggctggcgaaaagaaaaagtgcttaaataacgctttttttatccaatcagcttgctggaaaattggcattctcaaacggccgattggtcgcttggggtattaggctccccatacaagataatgtctgtacaacgggcaagcccgtggctttaaaaaacaacctattccaaaggaattatccacaataaatttgcaaattaaaatggcaacgaccagtttcgagaattatcatgaaaccagtcgttgcacttagactttgacttatatacgaatggacacttttagaataaagtcaagtggagagtcaataatggtaatccggcatgaaccgataaatgccacggctttcctgaatcaccatccgtttgttcgtgagaaacttaattatcttcacaatcttgttgtgattaaatttcgttcctgccagttcgtaggcagtggtcagttcttcttccaaagccttatatcccgaaatagtttctcttccctcaaaagccagttcgagagccttgcgatggattgtttcgtggatgtccctataaggggagaagggttcctgtttgggacgacctacgcttttcttggttggcacatagtctggcagaagttcgggaagtgattggtcattgatgcagaaggcaaatggcagaaagtctttggaacgggtatgcacactttccactttgctgatgttgttgtcgtccttgtctttctcgatttggatgacagtctcggccttgttgttgatttccgtgccgatgtgtccacgggcattttcatcgcttttgttctggtggaggatggtgtgaagatgaatctggtattcgtcagtccactgcatgagtttggagattacgcacgtggcttcgctcggagaattaatgtcataaaccaagtcgcggattccgtcaatcaccacgaaaccgagaccctcaatctgactgattgcatcatctatgatagccaaacgctccttggggttgaacttgcgtagagcgagaaaatagaaacggtcgcaatcctcattagccggcaactctgccagtttcatgatacgatgcattacaatcatacaatggttttgactttgctctgtgtcgatgtaaaggatgcggctctttccttcagggaagtccgttgtgtagttaagaacttccttccctgacaaagctgctgccaccatagctgacacattgaaagtctttttgcttttagccttgcctatagatgcgctgaaatttcccaatgtcccgataggcactccgcctattttcagaacttccggctcctgttcgtactccttttccaaactgagcattgtatcttgccatcttgtagcgacctgagcaagattttcaatgggtgctgccgtttccatactcaccagcttttaggattggctttgcgacgtgtagttgcaagcattcgggcgtgttcttcctctatgcttataggcgtttctccttttcttccgctttccaaccatttgtccaattcatcacgatagacaaacaggtgcttgccttgtttaatgattggaatacctccatgtttggctttgtaataaaaggatgatttcgagatacctaaatattcgcagacttcatcaactgtcattggaacatgggtatccttttttacctcgttatgctgctgatgaagtttttctgtcagcagattttccatacttgagattctctcgcagagttcgcctaccacttccggtaggtcattgaaggttaatttgtttctttgcatgatataacattgtttttgttaaacatgctgcaaaccaatacaatgatgtaatgctgacaaacctcagaaagcaataatatttcggtctgcgttgaataatcctaattggttgaatctaagtccgattcaggggcattcttcatacatttgaagtgataatttccggttttaggaatatcaagggctattttgcaaactcctcttgtccgaagatttttagccagatatttaatcgaagcatcttttagttcatgtgggaatatcgtatgtatgaatgttgctctgtctataagagaaatgctcaatctctccccgatattccatacgaaatgcattaggtcgatagaacggagggaattatctacttttgaatggattggcttgtataaatcagactgtccgtgcgcaaaatactctatgttttcatgcataatttcaagatcttcttttgagagaaattccgatgcagtatgtgtacatcgttgattatcaatagtatagcgctctaaaaggtacaaccagtgggttggcaagtgtctgagaatgtgtaagttagtgatttttagcaccattctcggcttgtacctccattttggaaagtaaaagtaagtgtaatttcttgaatatcaaaatgtgcggtacaaaaacttgtgaaaaattccattttttgatgagaaaaggtacaaaaatggctctgaaaccaccctcgaggttagagctattttctagaaagaaacttgctaagatattgatttctttttataatagctattgaggaagaaaatacctgtaacttcttctttatagaaggaggctaacataatcgcattagttagttgttgtaatgatttatattttgttccctctccttttttaagtctaaaagccattcctataagatatattatatgtcgtatatcgaaaatattatatatgtatgtaccagtagataaattttgatcttttatagaaaagtgtttcagtgtatgtaataaccctccaacaaagtcaatttttgttggatcctctttattaggcatagttgatcgaaacatgtctattctcaatatatcactgaatatcccattatcttgatatactacataacaacaagcatgccccgttagaaaattaatataatcctgtttggttccccaatatttatatccacttgtattatacaatgcatcaatgacatcttccgcatctccagttccaaacttatttggatatttctttgtagcatccaatatagaagaactaatcatttttaagaaactactattaaatactatataaaaatcatagttttcatctatatagtaatggttgatatctaaaattgaaaatccaaattggaacacattaattaactccttaccttgcttttctctttcttcattttcgtggttccatagggatttcaattttgattccataaaattcattagggcattgtattcttttatcgaaataattttcatcgctttattatttaattatttgttgtttctattttaaattataattatattctagcattgagaatttttcctctaatgaaaatagaggaaggcaagtttagttactgaaactaattttctacaatcccattattgctgatttttaaacggatataattgttacattcatgtcggccctagatactaatcattagagcagttttgtatataacttttttagtttttgcctgtaagaaatatattattaaaaatttaaactgtctctaactcaaacttgatattccccttgacatcagataacatatccgtggatctgtagtacgataaatagtatcttcattttccgatgcatctggtaaaataataccaagttttactaattgggaaatatacgttcgagccgttgctgttttaatattaaaaacattgcataattcagaaatagtaaaatatggttttttaattagcaatactttgttcagccaattgtaataattatttttatctgatattttcgatggttgaagcgactcgtagtcaaagcgtttacaaaactctatcaatccctttgatatcgttgcagaagagaatgatacaacatcaccattggtagcattatcacccatttcttcatcatacaatctattcattaatgatattagtgaccttggtgatcctccggctaaactcaaaatagtctttctatcattctcaaatggtatgagtgattggagagaaacaggttgttttttgttaatggaatagtgtaaaagccttttgttaattatttgttcgagttcttcatcacgccatgaaatatctatgtcttgaaatttatcaaaccgtactccacgattgttaagtgtacgttttacctctgaccacagactgaatacaatagatagtttgttagtgtataataggtttgtatctgttaaaatttgtaatgtaaattcagaaactttatttacgtcagcatttatctcagagaattcatcaattttgtcaaataaaactacaatagacccataattcagactcagtgcaatgtctacaagatgcttaagtaaagctaaaattttgtcattacctttatcaactacgtctttcatagaaaggctattaatttcattgataggaatctcttcgaaaatgggtatagttgttattacatcatcattttcaggtaatcccatactctgccgaaccacagaagaagttactttaatagctccgctaacaacgccgtttattaactttaaattcttgttaaagaatttagaaagtccaatatttcgtttctttgttttgattacttttgcctgcttcaaatagtcttcagctatttcatcatcgtagaacatctcaacaagatatgaaagacgctttttttgctcttttgagagaagtttggcatcttttcgattcttatacaaatgctctgaaagtctctttgttaacgactgtactatcttataaagaaaatagcctttattgttactcaaaggaatgccctcataacgcgtaataagcaaaggaagagttccattggcttttaagtcttcaaaaagcatatgaatagtagctgacttgcctagtcctctttgcccaacgagtattcgactatttccctgtctagcgtttgattttaatgcgtcataataccggggcttaacgaatatactacgcaaatcttcttcctcttctgcgctgaatcgtgcaaagggattatcgctaatgttctgtatcttgcacatatgtttatattatttcaaattttgttaaaaacaattactttcttcctactaaagcttccaactctacctgaaaatatccattaaattaattaagattaaagatttattggctactttatggagtgaagagctaatatataaaaaatttcttaactaacaaagaaggacgagaaaatatgattgcttaaaacataaaatggcatctttgccttatgaggcttatctgtatgagttattctttcagtatattttgcttttggactttaaccgctttatttcaaaagagtaacttattacttcagacttataacaattatatttgttaaatttctcaatgagatgaaagcgataagattgaattttaaaataagtcagccattagttctttaatattactgaaatgaactcaaatatttgtagaaacaaaaatattgtggtaaaaattgaacaatcataatgaaataccatactttatagaaacaatatattgtttgttataggtgaaatacgaactctacgaataatataatagcatttaatatctcaacgtccgataatatgcccaaagcaggtttcaacagaaataaatccgaaaacttatttctgtaatctatcataaaataaactaaaaccgctatatttgcatattatatgatatgttgagctatgacaaaaagtacaatggctaccaagctaccaaggaaattggagcagaagatgcagacagtaggtgaacagattcggctggccagactacgcaggaatcttagtattgctcaggttgccgaacgtgccacctgttcacctcttacaatttcacgcatagagaaaggtgtaccgacagtggcaattggtatttatcttagggtgctttatgcacttcagctggatgatgatattcttctgcttgcaaaagaagatgcaataggaaaggccttacaggatttgagcctcaagaaacgagaaagagcatccaaaaaagaataaggaattaaaagactctatgtatttgctgattttgattggcagaaagaaccaagactaatttgagcgctgacttatgaatctctatttgtggctttgatagctatggattttgctataatgatgaatgctcaaagattacatatatctatttttttagtgataacttgaacagttatcttggtcagcaatacacagtttccggcaaggatattttcggatgtttttctgatgtcctttcagatagatggggacgtacattaataaatcgcaaggagcagattttgacaaatggaaaatagcgttcggtgtgcgacttttaattaatgatttatcgaataagataattaggaactacggaaaatacaaagaaaattccaaatattttagaaaatcttcaaagataaataatgattataataaccgaataatatatttatatgttgtattttgacgaatccggatatactggaccagatttaactaatgtaagtcaaccttactttgcactggcttctgttaagatgactaatgatgaaattgcgtgcttaaaaaaagatataggctattatgaatggggaaaggaacttcatttcaaaagcatgtatactaatcctcaaggcagagccatattagataaaatatttaatcatccacttatggatgcaaatcatgtactcccatcatttgccgataagcgatactgcatatatgccaacattgttaatatattagttgaaactatgtattataacaaaggaataaacttgtatgaaggagctaaaaatctaatattagcaaatggcttgtattattttgctattcggcatccaaataaggatttagtggcagaattcgagaaaaattttgttacaatggttagaacaccatctgtagcatccgttgcggatttctatagaactacagataaattaagaggggatactggtacagagtctggattttttgagatgctgtcagagatacctttaactattcaatacattaaagaggccttgccttatatgaaattctatatcgatttgacaataccattattttctgtatcagtccaagaatggtataaaagaactggggaaaaagaggatgttctttttgattcttctgaaccattctttgcaaacaaagagtttatggaatacctaagagatatggatgttcctgaaactgttgtaggatatggcaaaggaaagcatgtttatcctttaccaattggtaatatagaaatagttaaatctcatgaagagtttggtatccagttggctgatatctttgctagtgctttagtttttgctcttacgccacgtactgataaattcgtgaaatatcaaaataagataaggcaactccctattttccaaaatattaagctgaatattgcaccatcttcaattgattttattgaggaaaggatgcaggatacagcagatattgatcctttagattttctatgcatgtatggcaatagcaaaaacacaaaacaggactaaaaatgtatagatatattattaactgaaattgtatagaatcttttcgatataacagaatttatagtcgagtagcccgccataaatgaagactgtttatggcgagctactttttagataaagaaacggtaatcgtatgttacaccgttatattgtcttaacaagtttcccacctgtgccaatgtattagaagtgtcaattgtggcaggtaactttgtatatagattaaacgagttccagttcatctttgtaaatcctagaatttctttagcaatagtttccaaatctccatgcccatagtatttggtaatttttaaaggagcaggaatacaacgtcctccttggtagtatctgcgatttgactgtattgagggaactactccatgtgtccataacaaagcatttctcgatgatagtttaatgcacgttcctctatcaactggatatccatcttcaagaaattgaccatacataatcttctctgcaataaactttaaatcatattcttgagtgattgtgatcaaatcaatttctgatattcctgcttgctttaatgcgtttgttataccttcaatctcatcattcttaaaaggggttcgtttatgaattacaactctttgaggtaacttttccatagcgtcttgaaaaagagccagtatatccattccaaatttataagcttcttcaaaatttaaataaggatttttctttttgtcaaattgaggatgttcaacttttgacagtttatatcttaatccctgtccttgtgcattgtatatatgactacagcctaaaacaacttcagctttacctgaatattgcttttttatgctatatccaattcctgcatatgctgtattttgatctaagtctgcaagagtccagggagttcttaaagcttttacaaatagagctaaagagagccaccatgaaatttcacataccatcttgtcatataaagtcttttcttctataaattgggttgtgaatctatgttgggcggcaaacgcttttatgtagttatgcaaatcaaatgtttctccatgataattgaattgtctatagttgctccatgaattaggtataaatattaatagcacaattcctgggaactgttctgaaagtttttgcccttctgtacaaatagtttttgctaaattaatggcacttttaggattatcatttattgatacccatttttcagaatgtgtttcaggtatttcaagtctacagttataaatattactaaaaccagtataatgatgtacatagtcagataatttatctgcggaaattgtagaatttagtctttttataaattcactaaattttgaagaataagaagcaggacagatactgccaatacatacatctttagggaatacatcaaaatatttcgcatcgaaaggcctgtattttgataatcctctcatcggattgtcatcatatgcaggtttattaatgtatggatttataaattcaagcttgggttcgttaatatgtatgccatgatataatgtttgttttatgttgtattcctttggagaatatatcgttgtgttaccttgtccgcaatggtgtatctcagcataaccacgattgttggatattttaaagataaaaccacttcgtgaattaacaggtatctcaaaacttaatcttttaccattaaacattatattacaccattcttgtaatttcttctcatattgctgatttctcattttatccaaatattcatgagagtattgttgtttgatctccttttttatttggtcattagaaataaaataaactgttggagtaattgaaaacaagacatatttctcttgtgggacaaatgataatccacattcaatagcttcatgtattgttacattatttttatttgcataaatttcttttttatacaacctataacgcttataatcaacacctaatcctgtaatctgggagattccataaagtacggctttgagaaataattctttaaaatagctgtttttttctatttcatcaatagaaatatgaacacgttcaatttcactaattaaatttttcccaaaaacttcattgatagtagatacagttgagatggcatatactttgtctttatatggtacagcaataaggggcttttctttaatcttttctctaagatatttccatctgttttcattcttatcgtatgaaatttgaaactgaaatatttcatcgggaaatgtagcaggaattagattacttttcagatatttttttgtacttccatcatgtatggaaaatggagttgtcgtattgtctatacttattactttaagtatttcattgatttcctcttgtttattagaatcttcgttaaaacagaattttacaagagataacataacattatcaaatccgtttgtgtcaatataaaacgcttgtcttccagcagatcgaatagtttgaattaaatctgctatttcaggtgtaatatccttgccgtagccacaccaatacaatcttcccgctcccttatccgtaaaagcttctttcaaagcaaacataagggatttatctcttccactatatcctatgataattaaatttttgtcaacaaaataacgtcgcaaagctgaaacaaattcactattttgtgagtctagttctttctccgtatttttgagtgttctaaatttacaatctccatgtaaggctatataaagtaattcatttgaactttctgtcctatatatacgatcaacgcaatcaagatttatagctataggtgttatattggcttgttgtgcagctctttccacgagtccatcgaaatttgtactccaaacagattttacaattccatatttattcagcagacataacaatttatatcctacatatggacttttcccattgcacaggctttcaaaatatttagttctgtccgcatctattggatatgaagcttcggcataaaaagaatattcttctggactccccaattgtggatatttcccttgcacatctaaccatttctgaatgatgtctttacttaaatcagatttttttggatctactaattttttttgattacctgataatgattgatatattaaaaatttccaatcccatatacaatcatttgccgattgaataccagatgagatggatgcaccggcacctaataggacaccaaatgacccatctaaattttgtttgattgatcgtaaaaaagcatcaaattctaaatataaattttcgggcatattcatatttatattataagtcgttggttatcgtgattttattatttctcgtatatctgactcacagcctcggctgtttctttcatcatttgtcgtaatgactcaggggcaataacctctatttgtgcaccaaacgaacggagcaaagaacgtaactcataattattttggacttttaaggttatcttccaatatccatcttcaagaggtgttgtcactgctgattgagattcatgaagtggcttagtcacaatatatccaatggctttatcactaacctttaaaatgacttcttctacaggagcatttgaacgcgaaacgccgacgatatcgctaaagtattctttaaaatctattccttcaggttgtattatgtatggtttagatgtttcctttactccttcgattctatcaattgcaaagtttgatagataatccgagtctttatgtttgccgatcagaaaccagcgattattatattgtttaagatgataaggagtaacaattacaattctagcatccttcccaaatggatgatatataatttcaatgacccttttgttaacaattgcattaaaaatgggtttatagtataaatccattcctttaagatagggattatgctgaaaacttacaactgaatccagattatctcctaatttactggtcgtatatagtcttttttcaaggtcgtttaaccactcaaattgtggtactccatcgaaacgtttaagaagtatcaatgcatcataaatcaaattgagctcttcttgattgataggttgatttttgatggaagcccctttagtatggtatcggtaatattttctatgcccatctcgaatggcatctatatccataccatatccttcttcactttcaatgaattttagatcttcttgtacttgacgtttttttactccgcaaccatctttcgtttctccattatacagatagagcgcttcattgcaggcatctactaaatcctcaatatagtaacgcctagaccaattgctcaggcatttatctataatctggtatcttaactgtgcattcttatttgttggcataggcaatactatttatcaaacaatacaaagctaattatgaacaatgcagtctttctgcattgttcataatcttttatattaaatcttctaatttatctactattgcagcaatttctgtagaatcaatacttccgttctcatggtcaactgtagtaaataaatttactccttcgatgtaaccgattgatttataaaaatctcgtttcttttcccatgattccttataggcgggattatctaacattcctaaatgttcccaaagaatggtatctccagatgcatcttcaaaagtaaaatcaggaatacatcggcggccgttatcttctatcattctttcatattcaaagtcaatacctcgttcatatagcatattagcaataattacttcagacttgctacgtacgattaaacctggctttaaggttgtgtgaatcaatccttccacatatggaatgtttgaaatatcttcacgaacagatgtagagaaaagatttgtatttcgcttagctaaaactgacatctgaggtttagtatactcgattaaccacgatatattatcttgtatcaacagaattaatttctttcttgctcgtgttaaagctgtatagattagttcacgtgaaagtatacgtccgcttttaggaagaacaaccaacacagtatcaaaatcgctcccttgactcttatggatagttatagcataagccaagtctattgtattatcagcctcatccgacttagaagaataatatgaaaatctcttgttgggtaacccggtaaaaacgactgtcgatttcttttccctcttatttgcataattaacaaaacctatttgaccatttgaaagttgacattcttctttactcgtagatttcttgcgttcattctttaattgaatgaccttatctagagcagatatggtaataggagctatttctattgaaaaatttttatttataccaacccactcttggaaatacgaattaatctgaaatgttccccataccggatttcttaccggagataaaacctgaaatctttcaacttttgacggatcatttaaggctttatttacatcgtcaagtcctatagatttacgaatcttatcggataaagatttaccttcctcttctggcaactctttttcaatggcctctttcaaacagtctttaaggtcgttttcatcattccaagtataaacagccaagtcattattaagatttcctttggcaacttgctcaaaaatgagatcggaattctttgcaggtttttctccagaaaaccatgatgctaaagtcaatatgtcagagtcttctgtattaatagttcttacaacatatcgcaattttgttattgccgatcttaaatattcgtctttattatcctttaggtagttaaataagtctgcaaatggtctgccagggccaataggaggtaattgaaatggatctccaattaaaattattcgattaatgttctttaaatccaatgctttcattaagacataaaagtccttacatgtaagcatggaacactcgtcaataatgacattttttgctccacaatatttacgtttttctgcatcttcaggaacataaggtgtcattgtagcccagtcaaagaaaccctgacgcgtcagaaattgcgcaatagttagggcttgaatacctgctgacatgttgcctaagcgaactcgtgctttccctgtaggagccaaaaggagcgtaccttctgcttttatttgtggcgattttaagaaagctctgacaactgtagttttgcctgttccagctggacctgccagcacagaaaggcgcttactgcagaacatttccaatgcctttacctggtcagccacagcattacggcatcgctcatttgcttcattgtaatcatcaatagatgctttaacgatcgtattccagtcttcttttactggtgatttgacgtcctttgaagcacgacctttgaatatcttacgcaaataatcatcaatttctttatattccttcaactgcaatgcacacctgtcatcagtattaaggtatacagttttttcttcaatgaactctttgtttgacattaaataattatatggcagttgatgattgtccgcagccaaacaatcttttatatataactcaatctcgtttgcagaaattaatgtatcaccatcacagagacttgccacaagttttgaaatgataaatgagcggatccttctattatcaattacagattccactagtgaaggagcttttggagtccatttcccttgaatcttagggtcagccattacgccaagatcaatcatttcggttgtaaccggaagataattttcaataagactctcctcgctgataatatatggattatttaataattcatcgtagcaatcaggacaatcaaaccaccattttattacttccgaatttatttcaaaacgtgatagcagttccaacacttgtctttggttacttagagtatttttccaaagaatacgataatgagtaagttcacttttatatacggaatcaggaagagacaattcacctttcatcaatttatcaaaggcttcccatggattatctttaaccccacaatatccattatttcgtaaatcctgttcaattataaatgcataatttactcctattgctgatagagcctcggcgaaagcagggaacggacctatcatatccttcacctttgcaatttgggaatctatccacaaaatttgttgtttccagtttcctccaaccagcccatgtttaataaccgattccaagcactttctggcaacattaagaataatcagcatactgtgattgctaacataatcacaaccgtaggataattcattaaagataatctggctattacctaactttgggatagtaatttttatttcatcaattacttcttgtttcgatttacctgtttgggcttttacatagtcttcatcaagtgacatatattcatggtatggcaaaagaaatccttttgacttcttcaaatcagttcttatgccatgctcaaagatcaaatcccaaaaaggatatgtataatcagttgttgtgtcatatgtttgtaccggtaaaactttggtgatttcacctataccaacaattaattttgcatcttcatcaattggattaccacttttgcaataaaaaactccgagtgaagtaccggcctctatatttaatctaaagtgatttaatatttcaaactgcctctcttttccatatacccaagatgtaggaaacggtgcagtttcatcatcagacagattcggatatttatgattcagttcttcctgataatcacgagaaagatatcggaaaggtattccaaaaaagctatatggtttaagttctattgttgtaggtaagagctttgcatgtggagtctctccaaaagcataaacatgtttgaagattcttttatatggcttctcattcataaagccaccattctcgccaacacaagcaggtaattgatcttgtttgagagagttccaatcctttcctgcatacgtttcttctttgttctcatcttttctttcagatatattgtgaagcatcatgcagaatggattatttttcggacattgacaaatagttccattccatttattatcgtgccaaggcacacggattgatatatgtttcatgataatcgtcttatttcgtattaatattatttcctacaatcttggcaaacgcatcagcacatttcttaatatcttcatactctgctagttttttgccactaaggttatcgtctgtccaatcctcaatatcttttgcatacacatctttgatggagctttgtagtgattctattttaagaggaacaggaaggttatttatttgcatatcatcaatgattcttttgaaataagcaaaatcaccttctatgataaatcccttatctgctgctatacgataaatcgcaatccaatgtctttgcttgctcaaaggtgactttttaggatcatatccaataaactggcaaatgctctttttcagagttgcgattcgtttttcttctggccaattctttacgtccgcttcagcgaccaattgctgatcatcattttcttcattataatatggatgcaactgaattactttatggacataagaattttctttgtgcacactttctgacttttgtatttcatgtctattcatttccaggtctgtaatagatgaacccgtggaatagaaatacatggttaggataatgctgattgcagtatcaacttccttttctgaagcggtaggagatatatgtgattcactgtttctccagcctttaatgagcataaggtattgatatagctgctgctttccttcatccgtgctgtatttcagattccatagacatttgtgggcataaatcacgtttttccaagttacatcttcaccgggattttgggcaggaacttcatggcctttcatcagataatacaatttcttcagatatgcctcaaacttggtgactaataaattaaatgccacaaacttatctacgatagttgctctcttaccgtatagattggtaaatgcccgttggataaacatgcctacattgtccaaagagtcaattgacggtgtgtctatcacatagaatacgctgtttataatctcatcgataggacgcatttgtggaagtactgcggtcaaagttgttttcagaatgctccgaatattatcctttatgacggccacgtctacatgctgtacttcgtctgtaataacgtcttcgtcttgcggcacctgttcttcttcggattgataattctcttccatattcaagtacgctttcagaatacgttctctacaactgctgtccaaaataaactctcgaagtaatttgtctgctttgggaataaccagacgagctgggacttctgtaccttctactttggtaatgaactcacgagttttggccatgttcaatgtcagtttcaaattgtcaaactgactgaactcattcagattctgttccgttacattacgactcatgatgtgctccagttgactggcgtttataccggtcgcttcggccagaatcattacttgtttgtgcaattcgcggaattggtattctgcgatataatcataaatcgtcttacctggcgacaggtgtaaatctccactttgcaggtcgtgtaggataatcattgccgtacgctgatccttttgtgaaagagatgcaaatgttttgtgcaactctttaaaggcttctttggtcagttcgcttcccggaccggacatatagaggttcttgatgaacttcacaaacttggagttgatatattcggcatcaatcgtacccgtacctgtttctgtgatataggtgtcaataggatagtcaaaatcatctctttccgtactgccccctccattaccttcaaacagttccctgtatcgttgcagcagaataaggtaagtctgttcgtccaattccatcttgacgtaggtataagtatcgccatgctggaactcatattcatccttatcccatgtgaatccttgcagcttggctgcttccagcagatgagtcatctggctgaaatctttggcaaacatattcctgtcttctcttgcttctggcaattttgtaaagttttcgattttttgtgcctggaatatatcccttatgtgcaagaacttctggttgatatttgtcagattactttccagtttatcgacaaaaacacctaacggcctgtccacatatacatcgagtgcatcattgatattctgctccatggtgtaagggaaggagtaatagcggataatgccgaaaggcttgtccggaccaaacaagcggttggtacgtgagaacgactggataatgtccacatatttcattaccttatccacatacagcgtatttacccatttggaatcataacctgtcaacatctgcgaaactacaataagcaagtctatctgctgtgcgtgatcatgttctatattgaggtaaggcttcttatgtgccagtcttttggccacatcctttttgtatttggcgtaggtggaaagctggaatgttgttccatatttccggttatagtcatccagcatctccagcaaggcatcttccttggcgattccgccatcagaattgtctatgttgttgtcgaatacggccaccacattcagagaagaatattgctccttgaatatccgataataagctattgcctcaggtatattctttgtagctagaatggcgtggaatttaccgttcttgctcagtttatcccttccgcttgcgatgtcggcagcaacagcctgatgatgaacaggctgctgatacaagtctttaggcagataatgttctattccgtgtaaggtttcatctccttccttataagtgtccggcatcttcagttcgttcatgaatcggttgtaaacaaccattttctgctcgtcattttcaatctcttcaatgctatttaccttcagttgagagaatgccactttttcgcgaagctcattgtcatcgtaggttcttaccatatacggatcgaatcccaatacgttgtggtcagggattccattggcgatggtgtatttatgaatcatgtcgccgaatatggtttcggtcatgatttcatgcttggcgttttctttaaacaccggtgtgcccgtgaagccgaaaagcaaagctcttttgaatgtattcttgatacctatcagcatatcgccgaacacactacgatgacattcgtctatgatgaataccagtcgtttgcggtctatcagatcaatatcgtcctgcgaaatatctttcccggccttgatgttcgacatcttctgaatagaggtcacaatcaggcggtcgtcgttatccgtacttttgagtttgctcaacaggatggctgtattctgcgtatcttgaatcgcttcgtcttctcccgcaaatccacgatattcgtccaacgattgcacgctcagctcgatgcggtccaatagaaataccactttgtcggcatcgccggaattggcaatgagttgtgccgatttgaaactggtcatggtctttccggaaccagtggtatgccacacgtatccgccacgatgctggtgggtatcccagttggtcttatgcgttatgtcgctgattttactggctgcaaaatactgatagctgcgaagtactttcagtgtcttgtccttatcgtcggcaatagtataataaccaattagctgatgagccatggggatgctgagcaagtcggatacaattcgtctccagtctcgtataacggtgttgttaaagtcttcccaatggaaatagaattccggcttgaaattctcttctttccccggattggcaaaatagagtgtttcttccggtgtcatggctacaaaaatctgtaccatcttaaagataccgttgctgaatacgccttcgtgggtataacgcttaatctggaaggtagcctgactcacatctacttttgaacgcttcagttcgatatgaattaccggcatgccattgatgagcaacatcacatcgccccgtcggtcaccgcccaacgggtgcgaagccttgaaacgaggttgtcgggcaatctgatagcgactctgtccggcactgatttcacgtgcatcgaaaatcttcagataaacttccttgccgtaattgttggtatcggcggggttgtcgcgtttgatgcatacctgtccgccattgataaacatattcatggcgtatgggctgtcgcacagattcacctgatcgatgatttggcgcatctcacttgcggtaagcggacaattgcccaatttattgatgtctctgttgttgtcgaagagaatcttggcccagttctgaatcaaatcttcttctgtgggttgtacaaggacttccttttcccaaccatgatgggggagaaggtcaaccaaggcttgttcaaactgactttccttgacgaaatattgtatgtcgtttatattatccatatttacttccttaaaggtttgaatgatatttatacaaacattttatccagacaagctgccttgatttgttttaacttctcaaggcgctgggtttggagagagatttgtttatcaagattacagaaataggatgctattttttgttgttctagttttgaaggtataaaaaaatccatctctttaaactcatcaaaacttattgtacggccatctctaattccgtaagtaataagttctaatcgttttataaattctttagatgtaaaaatatatttccagaaataatcataatgaaattccttatttttgaattccattacagtatatgcaggagatacaattccttcaatattagaatgagcaaatcctccttgaaatgatctcagatgtataataaattggcctggtaaaatatgtttataggtcgtttcatttgatttatcatgaaatacctgatatccaatatcacttcttttaaccattcctttatcttgagtagctgataaaacgggtaaatcaggacgatttcttacgtttgttgttttaaacacttcgccagctgtgacgaaatcccattctccttcaaatcctttaaatcttactttaggtacagtttctccttcttgtgggaacatagattgtaggcttgccgcctttattcgttttaaagacgcaagtttctttgaagtggtttgaattaatgagtctaatgattggaaataggatgctatcttttgttgttctgtataagataatggtatatgcacttcaccagatagggccgtttcatcactaatattaatagtgttttttgcacctttatttatgagaggtagaaggtatttattaagtctgaaattaggctcaaagtaaacactgatatagttaggatcgaagccctctttaacatcgtatattgcatataaaactgaaactattcctggtttgttgttatttactttaattattccaaaaggctttagctttaggggagactttgtatatactatctgccatttattcaaaattttataagtggatatattgtttcctgtataacttctacccaaatgctctatctgatttacaacgccaaattcatcagaaacagaaagagcgtcttcctttttatattctaatttgttattttttttattactaactgataggcacttctcaagaagaacatcactatagtaatcacagaactccttaaatcttatctccggcacattcatacatttacttcttttcatcattaatcaactcattaagccccaaaatcgcaaactcatctccggtcagttcattaataagacctgacaattctttttgagatttttccacgtcctcattcaaatgcttgtaacttacggcatactttttccctaatgcacacactttatcttcaaaagtagataagacctcagcgagcgtttcatcaataccataaacaataggatcaatccattttttatgtaggaatagagaaatatcttcgtctgaaagattttctatcgcttttacagttttgtcgataagagtctgcttggcttccttaatttgtttgttcttgtttttctgttcctcccagagtttgacaatcttcttcagtttctctttagtttctgcttccacctcatccttcttggcttttgctcccgcagtaatggctttcttatcaaaggcattttccttttcactatccaaataagcctcagactcctcttccgagaagttttcacggatttcatccagttcaccggagatctcttctactcgcatctgcaaatcggcaattgctttcaaatcgtcctgaaatttctcctgttgtaccaagtcaaaaggaatgatgcgccctttcaaaccatctggcacttcaatttcttcgtcgcctttctttaccagtttataagcaggttctaccactcttaccgcttcaatgccttcctgctgtatggtctcaatatcgttggtaatgccctgccagttgtcagctaacgcttgataggctgcatatcggtcgatgagaggcatcccatgcaaacgggcaaaaatatcatcggaaatagcatccaactctttctggggatttgcagtcgctatctgatcaatcagccgatgatgaacactatcggcaaaacctccgaaagcctgtgcaaacatctgctggaaggcttttacgtctgcattctgttctataaacgattgagtatcttcggtcttcaactgtgaataaggtttgtctgcatccgcaataaacaattcttcgcgcaaagaagggaatgtgtcccaatatttttgaagttcatcaatctcgctgtgaggaatgcctccgaacatggtggcatagatgtcgaacttctcaacaggatcactggaatctacataacgagggatgttcagattgtaaccgttttgacggatttcatcacgggacactgtacgggaatatccgggaactgttttacggtcgcgtaccgtatcggcaatacgtttgatgtcacattcgcgcagcttgttgttttttccttccttgacaaaaccctttgaggcatcgataatcaacacgtcgtcattgtcacgatgctgtttgagcaccatgatgagggtagggatacctgtaccaaagaagatattggccggcagtccgataatggcatcgatgttgttcttctcaatcaagttgcgacgtattttgccttccccttcactattttcatcggcatcaccacggaagagaacaccgtgaggaagtacaattgtcaggataccgtctggtttaaggtgatggagttcatgaagcagaaaggcgtagtcggctttgcttttaggagctacaccataatccttaaaacgcggatccagttcacggtcgttggcatcccactgttgcgaatagggaggattgctgacaacagcatccacgtaaagcggttttccgatatctccaccgtcagtctgcaaaggccagtcctcttccagagagtcggcacaacgagtattgatgttgtctggtttgataccacgcatcaccagattcatacgggtcaagttgtaggtgttttccttcagctcctgcgcatagtatttcaccttgttcttgtcttcgatatgacgcccaaccgatttaccgatggtaatcagcaaggaacctgaaccgcttgtagggtcataaatttcaattttgtctttattcttatggtgttcagccacaatttcagacatcaagatagccacctcgtgaggcgtatagaactctccagcctttttcccggcattggctgcaaagttactgataagatattcatatacatatcccagcacgtcatagtcctgacgaccgtctgtgggaatgtccttgattagcttgatgagatccttaatggcacgtgtctgcgaggctgggttctcacccagtttactcaggccagcctgtaaagtcttgaagatgttctcgtagacatgtttgtaatgagggctaatcagacggtcgaaactgctgagtgctccgctcaagtcggctacactaaattcagaattgggcttcagccaggtagcaaacagattttggtattcaatgaagtagccaatgttgtttctgcaatactccatcatcataactgcttcctgattctcatgatcttctacaagtgtcacaatatcctcatcagtccatccgatactgttcagatagttcacctcattgtctgacagaaatttatagaaaatcaagccaagaatataatctttgtattcgttggcttctatcttggagcgcatcttgttggcagatgcccatatcttattggcaagttgttgtttgttcataaaatcaattttaaaaatagcttactctatgtgtgaatatcataagcaaagatgtaaataaagaatgcagacattctgcatttattgagaatacttagtatataggaatctcattcatcagactctcttagcaggtccttaacctccacgttaagtactttagctatttgaaatagcatttccaaactaggttgtgccgtattggtacaccatttggagatggtagcaggatctttccccacttgctctgccagccatttattggtcttttccttctcggcgagcatcactttgattcggtttatttttttgttgggcatatctcatctttaattaacaataatacaaatataatccttttgcctaaaagagcaattgagttttaattaataattagatgtagaaggaatttttattgcgtataattcaatttttacggtattatggccgagaacaatgcatctaagagattttgattaagataaattgtttacttttgaagtatagacaatcttaaaattgatttttatgaatgataatattgaatatgagaaatttactcaagagatttataatgagattttgaagaatttgtatgtaaagaatatagatgttaagcataatgtgaaattgactggaaagtcaggccagaagcatcaaatagatgtgtactgggaatatcaatatgataataccacatttaagattgtaatagagtgtaagaattataaccacacagtatctattggtaaagtgagagacttttttggtgttctttatgatttgggagatgtcaaaggtataatggttaccagaaagggttatcaggaaggtgcaaagaagtttggtgagcattacaggattgatttaatggaattaagagaaccggaagagggagaggctattgttgctgaaaccacattaactattgatagtcctgttagacatagactttttcaggttgatgaagattgggctaaagcacatgattttaatatccaattatataaaaaacgactggactgtttgagtctttcgcctagtagcaacaaatggattaatgcaacccatattcctttaacaactaaagaaaataagattagaaatgcaaaagatgagattattacagatatacagaaattagaagaagaattacctgaaaattgcgaacaaaataaagactatgtatttccatttgacgatgcttatataaaaacagattgcggaaatatcaagattaaagaaatcaagtttgaatatgagaatcatacagaaacaaaacagattaaaattgatgcacaaaacataaccaaggcaatacttaaaaatacgattagtaaggaggtacagttaatagggaaaacatatatggactataagtcccaaatgaagtagtttgttctttactttgttgtatgttatttataaaaattcggactgaataatatcgaaggacaactgtactttccctctctattaacggcaaataatggatttacaaaataaaaaaggagagaaaaacctctcctttttttaaaatggtactgtccaaaattttgtgtaaatggaaacaggattcagttgtaagtttgttcttatatctggattctgttttcaaatataagcataaactggttcataatcaatccccagtttgaaataggcattgtccatttcttttcaatctccataagtgaaagatacacgtttttttttacggcatcgtccgacgggaatgaaagctttgatttggtgtactttctgatttttccgttcagattctcaataagatttgtggtatagattattttcctgatttccaatgggaactggaagaaaacagtcagatcatcccagttgtttctccatgaaagtatggcgtatggatactttcctccccatttcttttccagattgtcaagttctgcggcagcaacttccttattaggtgcattgtagatattcttcatatccgccgtaaactctttcttatccttataaacgacatatttacaggagttcctgatctgatgtaccacacagatctgagtggatgactgggggaatacggtacggatggtatctgtaaatccattcagattgtcagtacaggtaatcagtatatcctgcactccacgagccttcaagtcggtcaggacacccatccagaaagaggaactttccgatttgccgacccacatgccaaggacttccttcaggccgttctgtttcagaccgacacaaagatagacggtcttgtttataatcttgccgttatcccgtaccttgaagacgataccatccatccagactatcagatagaccggatccagaggacggttctgccattcctgcgcagcctggcttaccttgtttgtaataatggaaatagctgatgtagagagctctatttcataaatctcacgcatctcctcctctatatcggaaacactcattcctttggcatacagggagataacaagcttctctatagaaagtccccggctttcatgcttggggactgctatcggttcaaactgcccgttgcggtcacgcggaatggagatgacagactctccatgtccggtctgaattttcttcggataactgccattccgggagttgccggtgttgttccctgccacggaattcttctcataccccaaatgggcatccatctcaccttcaagcatcttttccaatacctgcgcatgcaactgattcagaaacctgctcacatccgcttctgtcttgaactggctaaggaactccttgcttaatacctcatcaggcactacttgattcttttctttcataatctttttcatttggtaaatgtataaaataaaaaatacggaactcgattttgaatcccgtattttccatttacacaaaatattttatagtgcctttaaaatccacattacacctccaactccttcaacgacaacccataattatattgtctgaaaaatcctctgtggataagtttcagaccaagggtctgataatacttgtaatcatcatcttcggtgcagaggtatttgtacccatagcgcggggcgtactccttgaagaagcgggcaaggtctttcagattttcctgttggtttcgtttgaagttgctgcgcacaatgataatgctccagtcggggatgctgccaacgccgcaactgtattcccagaaacggatgtataaatccatttcgcctacatggacagaaacacaaatgccgttggcgttgtgtatgacggaacaacagtttctgtaaccgaatctctcacacaaatagagattgaaatcataaataaaatcggaatagttcataataatttgaattttgatggttaataaaaaattgattatagactgaaacctcgcttgcgtttcggtttctttttcttctttttaagccggttggcctgtatcgcttcctccgtatcataatccgtaggagagggtgtgaacaatcccacactgatgccggaatgattctcctgctggtattcatgccgaggttcctcgcgtatggttgctgcctgtacctgacggttcatggtagcggaaagagcgttatatctcagttcctggtcgatgttcaggtaactgaactgacggtcaatcttggaaccgctaaaggtcagttggtcacatgtgaacttgacaccttgcatctctccggtcgtgcgacttagcttccattgcgtatcaattccgtatttccgtaaggccagtctcagctcactccagcttcgggcgttcggaacctctcgtttcaaggcatgatagataaaatactttaccttgtcatgatgacgtaaccgcatgaaattgacatgctcttttccttcggcaaaatgcaaacggtaacgggctgtcagcatcttgcagaccttttcattccggtagcggtcgttcttgtcgctgatggtgcgtccgtcattatccacacggttgtaaacgatatgacaatgcggatgattacggtcggtatgccgggcgatgatgaattgcgtgctcacgattcccatcagcttcatatagtcatgggcgatctttagcatcagcccatcatcatcacggatgcgatccccgtcctctgcggagaagctcaatgatatatggccgaccttgttcttgaccttgttgttcagtaaagtctgcaactcgaattgttccgctatttcttcaggcgagccgtagacaccaaccgctttcagcaggcgcgatttatcttctttcagcacatagtttacgcacccggaaaacgatgtacccttgacaattttaccgatcatccttgagctgttttatgagttgtgaaatctgttgaatggcggtactgcactcatcggccacacgataaaaaccgtaagcattggctcgtctggcaagctggttcagatttgtgctttcgccaatcagttttcggatgatgtcaagattttctcttgtaatccgttcgcgcaccgtaccgtgttcgatgagtgaacgcactacttcgctttgactgcgtttactgcgtcggctgagtgctctgagccagccgaattgttcgtctgtaagacggattgtaactgtatttttcttgtccataatattcgcttttgagattaataattgtgaccatcgggagctgtctcaccttcttttgaggtgagcaagtggccgggaaatgtaatacaccggcataaacttgctccagtgaaaaaggagtgaatcagacatctgacaatcatcgtttgaaaagtcctttccgagtatgttgaaccgttgctgaaagcggtgctttctccacattgacaagctgtaaatcgaaagtttcgaccagcgttttcaaggccggattcaacgtgataagacgattgaaaattgcgtcctttgtctcttctctcagcagaaaatcggcaatgtcataacctgcatcacgttcttcttttgttgcgtttctttccataaaatcgaaaagagaaacctctattcccaggctccggatcatctccattttactgttccaatagtcggtcgcccccaggtcggggaagagcagaacacgtcggtttctcaatacgctcatggcatcccgattaaacgctccattctttccacccgaagcaatccagaggtattgtggcaggtaaaagctggaaatcaaagcgcttttctcactctccacaagggcaaccggacgctgctggtcggaggacaaaaggtgctcaccaaacaggcattgccggagattgaaattctctttcttcagaagggaatgtacccacgtgatgtagttgtgcggctttttaatccgtcttccgttttcaggattgtagagcatcacttttccggtgcgtacccgtccggaaatatccacctgccagaagaccgtagctcccggccaatgcttcgaggttcctacatggtagcgcaacattagctcttcggtagcctcctgtccgaaatggaaactcaggaactgaaacagcttgttcgtgtgatacagtttcagggactgcctcatgatttccggctcaatgaatgaaggcgcaggaggcagactgatacgtggctttgacatcggcgcaaactcttcgctcaatcgctctttggccatcgggttctcgtcaaaatacattttgggcgtatagttgtagccgcacttctgttcatggttgcatcgtcctacataatcgggaaagctgatttgcttctccgtatcgatgtatttggcgaaacaacttttgcggtggcagttcgggcatgtgtgccgggtgctgacacctttgtatggttctaatgtgaatctgtagttcatttttctttctgtttggatgttactatgcacattttcgcaacttcacacccccctcggttgcgaaaatgtgcgtagtaacaaggttatttactgtattctccatgattctcttttctgaataatgttccgatgtgtcgttttagaaacatcttgaaagcatgctctttcatcccgtaactttcagcaatgccgataccttctgcagttgtaaatctctgcggcaggttcagatagatgttgcggtgcaattcgctcaactgttcctgactaacggcagtctgcatttttacggctgtagtccgaaaatattcagtcagcaggatggcacggttcacgctttcaaggtcaatcgtacgtttgtcgcactctccacaagtccatcgggcaagctggataatcagacaaaaccggataatgtagatttccagtttgcagtaaataccgaccaaagcatcattggtttccatatcacattggcgggcattttcatgctgccaaccgtaaagtcgttgcttggcatcttcatcgaatggtaggcattgaggctgcaactcattattctcgtcatgcgaacaatcctgagcaatcagcttgtctataatctgttgccactggatttccagttcttcagaagtttcccggtcgttccatctgcttttcaagacagattcaggcattacgaaaagaatacggtcaataaaaccgttactcgaacgctcgcccttgaccagttcgcccagaatcttcttttggatggtaccgataacagagatatagggacgtttgataaaaatggaactttgcgtactcttgcggtctgaaatcgtgggcttggcattgaacaccgaaagccagaactgttcttccgaaccgttattatagcggttgaagttcttgaaccaggcagacagttcgtccgaccaaaggcagagtcctctgggattttgggcatgtatcaggctcaatccttcgggagtgatatccgaaacaagaaagcgtctgcgcacgggagcctgcggaaactcatccaaaccggcttccatgcgttcctttttgctcatggacatagtgcgttcatactcggcatacaacttctgatattcttgattctgacaatagtcgtgctcgataaacggctggaaagcgaaactcagcggatgacttttattggctccagggcgtccaatcagtgccatatacagaatgggactttccagccagttgcgcttcacctgtaccagatgggagttgccaatccccacggcaatagccgcaaggatagccgcagcaacataatccacgggatagccctgacaatcgtgcaaactgctgatgatacgctgaatcctgataggaaagacttctatcgggaactcaccaccggacattttggctccgatgcgtacagcctcgccgataataccttctgctgttaatttggaggtttccatagccgtgcaaatcaaaagttatagcctccctttggtttgcgcttcgctccatgtactatctccgctgcctgttcctgaagtgacatggcccgcatttgcttgcgtccggtctcaatccattgcagcaactcatcttcatagaagtagagtttctttcctcgtttgtaagccggaatcagtcctttacgagcaagcgtgtaaatggtaggttttgcctttcgtgtgattttacaggcttcgtcaatttcaataagacgatgcttgtcggaagaagcctgcggttgcaatgccgccaccatctgccggatttgttccatctgttctgtgagataacctaccgcctgcggcagcttatcaaaagtgatttgttcgtttgccatacgtactcgtttttaattgttcgctggcaaaggaaattggtgttttgatggtggaaaatatcaccggaatataactgagtaataaataaattatgatatttattggataattcaaataaaactattattttcccatttgctaagaagttaaatataaagatgttatgattagacatacacatttttcaattagtggtaatacaattgaatgtattgtatatcttgaatgtttaaaaaaggttggtaataatgtttttgatgtctatatagattttcgtcaaattaaagatctaaatcattttgtacaatctaatcctaataatcagatttttaataaaattggtccaacctatattgaactcctatcattaaaaacaaataagagattattgacaggatgttattataaattaaatattgatttgcttaatagatttgattttgttgaaaatacggaatctttatttataaagcgttcctataatttaaacaatatgcaatatcctggagttgacactgaagagattttacaaaaacatactgttttggatccacaagaactttttcgtaataaaataaatggtcaattcacaatagaagaattacataattataatttaaaattatgtgttagagatgttggacaagcaaattggaatgagttaatagataataatattgtaaaatatgtttatgacataggagcagagctacattctaaaatcgatgatgtaaaaaagctgttttatgaacgtgttgacgattataaacgagataaaccaatattagtattatctcattgggatatagaccatattcaatgtatgttatacgttgatattcaaacaataagagattgttttagtaaatgtatttgtatagatatgatgaagactataacatctctcaaaatttataataatattcttaaggccttgggaaaagataatgtatattgtattagacctgctgatcgaactaatggaataacaatgcatttatggaatagaattggcaatattgctttctataaaggggaaaaaagtagaaatattaattatgcagggttatgtatgtttgtttcaggtaaaataaaaagtgcaaattttacaggtgatataaaattgatacaagctaaatatgtttatgatcaagaaaaggagtttaattccaatactatagacggacatatattagttgctccacatcatggaggtgattatgggaagaaagctcgtagttattcgcaacctacaacagatgttgtaatctctgttggagcaggaaatagttatggtcatcctgaaaaatatatgttatcttatttgcaagaactttgtagcaacaacattaataggactgataaaaacggggatgtagtaaaaagtatataatgtgttatatttactttgctatattcatatctaatttaattttgcatactgattctgtgtgagacattttacgctcaatagttgagatttccaaatcgcggagagtgtggtcaaagacatttttaatgaatgtggctgtgtgaatgcgctttttgctgaacgctttaccaatattccatccaaagtgcattatatcaacgcttttaagttgtgagtcaacctttacaggcgatatcttttgtaaggtatcgcctgagctatattctgcgacatatgcacatagacggttgaggtcttcttcactcatataggcaaccattgtttgcttcgtatagttgagaaccttttccaatttggtttgaatagcgcgattcttttctgcaatagcattggtgcgcatgacttcatattctgaaggttcggagattgtttcttcagtggtaggagcagactcaatgacatcaggtgtagcttggtttgaatctttgattgtaggggcttccggaaaagaaacggcgtcattgttatctttcatcttttgaaaagcagagaaacaaaatagaaaagcttctatgcgtggcagcagaaactgattgaaagttatctgcaaactggaatatagtgctgtcaatacaataaccgttgcaaaaaatgcaactgtactactgaagtcatcaataccttttgataaaacaaattggcggattaaaataccaaagactagaatgactccaaacaccaaggaataaagtgctatatattctgcttttttctgattcatgatgatatttgctaattgttcagctacaaatatataggattattttttcaaaaaatcaatagtattggcctactatggccttttgacaatagatttcatcaaaagacataatattacacactaataatcaatgaattgtaattatttcaatttttaatgagacttttataagaactatactaattcctgataaaattattattctaatattcgattagagataatatttcttttgttagatgctaatgtttggctataatttagtatctttatgaaactataaaatagaattatatggcaaatcattatagtacatatttcaatattacgcatgaagatttagttaatagaggtgtatataatgcatttctagataaggattcattactccatatagatccattattattaaaagattgtacaattcctgaatttaaaaatgcttatgaagattttcttcaatattttagaggttttgttgcattaactaatgcagctagaagtaaatcgactaaagataaattttttaaaaggattgtagatagatacacattaaaagaaatttcaaatactggattaggttattcaacgggaaatacacgtggaagaggtataagtggagccttgtctattcaattagcagaaagcacatacgatattataaaagcaggaatgacagatcctgagatcttttgtctgatgcaattaattgaggataatatggggccggatagaatcagtgatatgactatttctattttacatgaacattttcttgcatatacccaacgtattagtgcagaattgaaactgccgacaaaactatatagatattcatacgatttatcgttcaatgtaccattttatcaaaataaaccaatactatttattccgacacagttcttatgcgatttaccatatgctatagactatgatgatatagatagagtttgtgattacaataatagattgaaacagaaaatagcaagtattataggtgtttgttggacagaatgtcttaaatataagaaatctgattggaaatctttaatttgcaacaatagagattgctatgatgttgcaattgagtattttaagaaaattaagggaataccatatgattttaatgaagatagaaaaggacaatataaagatatattactggctgaattattaagtaaagtcccatttttatgcaatattgaaaaatctaaaaacataaaagaagaggtttatgaactttcattagcaatgtgtaatcaatttaaaagacttgtagaagatttgcgtctatcagagctattatatcgcaaaggtagaaaaccagatgaaactgattggcaactaatgttatttatggtggcagacacgtatagaaatgctggacaatttgatgttgctatttctcgcgagtctaaccctggagttggagaacttgattttcaaataacacgtggtgcaaaagcaaatacagttgtggaaattaaacgttcatgtaataaagatttaatgcatggatatcggacgcaattagctgcatatatgaaagctgaacaagctacaagtggtatttttatggttattgttgaggatgactctattgattatataaaagcccaattaaatgaggtcaaaaaagatatgattgataaaggagaatacattcctaaagttatatttattaatgggaaacatcagccatctgccagtgcccccagttataaaaatccgacattataaatataatgagaagggagtgtatggtttataacaacacactcccttttaaattatttcaacgaaatcttattcgccgtctctcgcttcttggagttaaccaaatcagcataaatttgtgtcgtggtgacattcttatgcgtcaacatcttcgatactgtgtaaatgtctgtgcctaaagagatttggatgaccgcatacgagtgcctaaagcagtggaaggttatgtgttttctgattccggcttcggcaatccattgtttcaagggatgatgagtcatggagcgggttaagcctttgaagacttttccggtgccccattcgccacacaactccagtgcctcttgactaatggggagggtagcctcggtttctgtcttttcggtgcagatacggatatagtaaccttgatccgggccaacctcaaaatcacgccagtccagcttcagaatatcactgatacggagaccggtcatacaagcgaatagggaggcttgttttaagactggaatcttgcatggcgtagccgccagttttttgacttcatcaagtgtcagatactctttcttgacctctttccattcgattttttccagaaagtcgttcaagttctcacgcaacatcttctctttataggctatttttaataaggcacggaacgtcgaataatagccagctgccgaatttcgtgagatataagcattgggatgattgatttgtttgcatttgagcaggtaatccctgaacttctcgcacagttccacggtgacatcgccaaaggtacatttgccgccgacaaatttctcaaagtgattgtaaacacaatcccatttctcatacttttcccgtgcctttgtccggaagtaggcgaggaaatctaccttttgcttgttcttgtccaggaacccgaattcttcattgataagcgactggacacggatacagcggatggcctctgccttattcagcatatcctgattgaacattctttgctgctcgttcttgggcttggcatagatgtaaatgccgaggaattcccggcgactcatcttcatcgtgtaaggattgcgaatggccggataataatccagataaagagatatgcggtcgttacgcaatggcttttgtctcaaagttacgttggtgcatgtaagtgtcatagctatattgttttttgattaatacttgtttttgttgcaaataaaataggtgttctaatggtgatgtttatcaccggaaaataactttcgactcattctatctttggaggctcaaagaacttgtccagctctgcccgcaggatcttggtatatttaccgaccttgatacggggaatattatggtatttcacataatggtagagttgatctcgtgtcagattgaatcgctccatcgcttcggcaatggtgtagtatttgggctcttctggggcaatgagacctttggcaatgtccacatgctttttggagtagtacaccatgatgccgaccttcttcttgggaatggcattctttgaaacaaaagaatagatggccgtcagtgtcataccgaacttctcctgtatgtcttgcgtgctgtaccattccttgatttcaggatcgggagctttctttgcaaagtagtcatcaatatgctttttgctccaataggttttaccacggtgaaaggttcgtggaatattatgttccttagcgatatgaaatatccaggaatcctttacgccatacttctccttgacttcggcggtggtgtagaaatcattaatggaaggtttgtctcttaccggaatcttaaattctataggcttattgaataagttatcaatatcttcctttttcaatagaaatttatatccaagtcgagaggcttttaattcacctcttttcagatagccataaagagtaggtcgggttacgcctatgtatgtggcagcttctgtgatagtaagaataggcttgtctctgatcttctcaatcggcttttccttgatgactttttcgacaatttggttgttagccttaatagaagcttcacgtttcttctgtttatacagaaggtttgcacatctgtgcgaacaacaggttgtagtcattttatgcgcaatgaattcttgcttgcaccacgcacagattcgtctgatttcaatgttgctactcatgttatttctccttatttctccaatatttttgtataactccgtaaaatcccgtaaaatggcgtaaaagttctccacgaccttgccaacgataatcctcagattttcgtggtgaggtacacaagaggtacaaaaaatggcgtaaaaaggcttagcaacgattatcaacgatacttgtgcaacaaaaaaggcgccccataaagagcgccatattaatcgattacaatcaatttaattcattgataatcagatagttacttgccgatgcaccataatattctcattgattatcaatgccttacaccttaaaaggtagactgctcaaaaatttacttgttttttcgcaaaaaatcgaagatttaacgttttttttcatcgactctctccgaacagaggggaaaaaggcaaaaacagccctttcgggccccgacagacctcgtctgcaaagatagggcatgtcggggtttatttcgcccaaacgggctgtaaaatcgaggatggattcacggatattttctgattccaattgttggatattgcgtctggtcgaagaggtgtttcactcggccttaatagcaccaggagcacacataatttttgcagccaaaagagaaaatggccggaaccatttagccatggcgcagccatctctttccttccctttttttgactttactttaacgaacgtatatatgaatacggggataaagtaaagttactttcgtataggtctagtttttcaagtttactacaattgacacacagtatggcggaaaaagtgtggaattttaaagagttattctaaggaaaaatgtatatttatgacttaaaagtaagtggcacatgaaaatacaatctgttcatattagaaattatcgaaaattgaaaaactgtcatatagactttggcgaaaaggaaacagttttagtcggtgctaataatagtggtaagacttcagctattagtgctattgtttggtttctaaagaatacagatagattcactttaaaagagttcactgcaacaaattgggcatcaattaatgaaattggcgagaaatggcttgaacatgattctgtagatgaagcattattgagttctcatcaatgggataacattgtgccatcaatggatgtttggataaatgtggaagatggagaacagtaccgagtgaaccatttgataccatcacttatttcttgggatggtaaaaaagttggtgtccgtggacaatatgaaccaacggatataaaaaaactctacacagtttacaaggaagccaagttaaaggcaaaagctttagaggatacagaagaatgggagaaagcgggctctcctgaattatatcccaaaaatttatgtgattttttaggtaaaggcttgaaccttagagagtattttgatgtgaaatattacatcatagatccggctcttgaccctgataacgaagacgaagtgcaaataacgcctgacaatgagattggcaataatccacttgacggactaataaaagtggatactatactggcatcaagagacttgtctgatccggaaggacaaacagacagtgatatagatacattgtctaaacagttccaacagtattacaagagcaatggtcaagaagatgaagaattgacttgtgaaggattgaaactccttggaggtattgtgacagcgaacaaaacgtacgatgaaaaattaaaaaagacttttgaagtccctgttggagaattgaagaacatcaattaccctggattccagaatccagagattaaaatacgaagtaagattcagattgaggaatctataaaacatgactcagcagttcaattcgctattcagggtatggaagaattagctcttcctgagaagtacaatggacttggttatagaaatcttatctctatttatttgaagctgatagacttcagagaaaagtggttgaagggattaagcgaaggaaagaatattgagcctattcatatagtgtttgtagaagaacctgaagcgcatctacatgcccaagcacaacaagtatttgtgaagaaagctttcgaagccttatgtaataacaaactaattgaagcaaatccttggctaagcacacaacttgtgttaagtacgcattcaaatcatgttgtcaatgaacttgacttaaactgtatgcgctacttcaaacgagtggtggatgttggcggaaagatccctgtttcaaaagttgtgaatttatctaatacatttggaacagacgatgaaacaaagcaatttgtgacgagatacatacgtttaacacactgcgatatattcttttcagatgccgttattttggttgaaggtcctgcggaaaagatactcgttcccagtttcctcgaaaaagccggattagattcttattatatttcagttatagaggtaaatggtcgccatgcacatagtttccgtaaacttattggaaaaattggaattgcaaccttgattgtgactgatatagatgcgactgaaacaaaagtatgagaagacgggaaagaaagacatctgcccgtgattacagccaaaggcaaaggctataagacaggtaatccttccataaaaagttggctttcaggaaaagaacaaatagatgatttattagcattagatggaaaagaaaagcttgtaaataatgtaagaatagcattccagacacctgtgaatgttaaatgggataagaataaagatgacgtaacagaagtgtgtccctatacatttgaagatgcattgatatttaccaatcttgaattatttagacaggaagggttaaaaaaaatgggtgctattaccacaatagcgaatctgttggagcatagtaattctgcaaatgaattacaaaatgagatatttaaaaagctggaaagcaaaagtggtttccaaaaagctgattttgctatctctctgctttataaagacgattttgttgatttagttgccccactatatattcaggaagggcttgaatggatgaagttatatttggattctaatgggaacagcaatgggaaataatatagacctccaagtagatgagacactagaaaagtgtattctttcaacaccacgtaaaagtttctttctttttgcaggagctggctcaggaaagacttactctttagttcttcttttaaaaaaaatacataatagtattggtaaagaccttctgttgcaaggaaagaatgttgctgttattacttttacaaatgctgctactgatgagataatcaatcgtttggattatagccccattttccatatctcaacaattcatagttttgtatgggaggttataaagtattatcagtctgatattaaaagattgtattgttcttatatagaagaagatctaaaagcactggaaaagaaaatcaaagaaactaaaaacaagactaccaaaacatatctttctagcgttgaaaaacttgagtgccaaaaagaaaggttagcaaaagcgcagactatagagaagtttgtgtataaccctaatggtagtaatccggagtataatgccttgaaacatgctgaagtgatcagaatctcagctcggatgattattgagagcagaatgttgcagcgaatcatagcacaacgatatccgatattactgattgatgaaagtcaagacacaaagaaagaattagttgatgttttttttgaaattcaaaggaactttgctgatatttttactttgggtttacttggtgatcagaaacaacgaatttatgcagatggaaaggagaacatagaagattctattcctactgagtgggaaaagccagtaaagagaatgaactatcgctgtgctaagcggataattcagttggctaacgacatcggtaaggacattgatattaatgcagaacaaagacctcgcgaagatgctaatgatggtttcgtaaggctttttattatacagcaacgtgacggcctaaataaagatgaaatagagcagaacgttatgaggattatgagtgagcaaacccgagacgaaaaatgggcggctatagacgctgatgttaaagttctaactttggaacacatgatggccgcacgaagattaggtttttccagtttttttgctccactttataaagtttcaaaataccagatgacattccttcaaggtgctgtatcagaaatagagttttttacaaaggaagtacttccaatcgcagaatctataaaagaagatgggcggattgctttagagattttgaaaaaacactcgccattattgagtggacaagatacaaagaacccatatgaactttatttgaaatgcagagaagaaaccataaaagttgctaatcttgtaaacgagaatgaaactatccgtgtcgtagtagatgaaattataaaatctcaactattaatagtaccagatgtcgtaaaacaagcgtatatgttgaacccatcggacatagaaaatatcgtagaagaagatatacgtgcttgggtggaagtaatggatttaccaatcaacatggtacgcagttatgatgattatgttaaccatcgttcacaatttgacacacatcaaggagttaaaggtcttgaatttgatcgagtaatggttattattgatgattctgaaataagaggttttttatttagttatgacaaactatttggtgttaaagatttatccgatgcagatttgaaaaataaagaaaatggaaaagaaacttccattgaacgaactcaaagactattttatgttacatgtactagagcaaaaaactcgttggcagttgtgatgtatacaaataattctgagggagtaaaaactgaaaccatcaaaaaaggctggtttgaagagagcgaaattatagtaatgtaatatttggaatgataatacacattataaggggacagtgtcaattaagatgagtgtaaaagccaatgcctgaaacatcttattatgcaatgcgcaggttcgataacaaatatttttagaactgttgattttttaataagcggattatatgcgttaaacgagatcatatttatttagaatctttattattgaaaacgtaggtttcggagtttgcaattaagcgtttaatgtgatttcttctaatagattgtcccagccacgcatgggcatattcattgtatatgttcgttgcaaaaatacctgcatcgtcacttccaagaacaacattcagaccttgatcgagccatttcttcaaatgatgctcagtataatttttataaattccgattcgtacattacttgtaagtggcgcttccaatacaatattccgttccctaacgatttgtttaagactattctgtgcaaaatcaacaatttcgagaaaattgttgtccaaatcaacaaggatgtgtttgtcataagaattattgcccgaacaattttctcgatgcatccaataatcttccataatagcttttaccgcaggagtaagattggcctcttggaaagcatcccattcagccgaatcgaaagtctctttgtaggatagatctatccatgaagaactttgaataaaaatgggattccatttccgattcaaccatgctacgatggcatcatcgatgtcattgatgctcttattgtatatatcggcgtaatgtttttttatactttctgtgatatttagcggtatcgttctatgatcttcttgatatagatggtaaataaataacagattatctaaccattctccctgtttcatccatatgtggtcgccgatacgttctttccataaagcataatccaatcccaatgccactgcatgtccaatccggtcagcattgtttagtggtaaaaattgaatagcttcataaatggctcttaacccactgacgatatgtgaaaaatcctctccagcatggaacgtaaaatggcatgcgttagacaatgttctgcgaattttcccatatgcagatgcgaatatttccggcggggcatcgaattcactagcagcagcatcaatgcctacaaatttttgtaaattcaataattgatctacggattctcctgaatgttcgtcaatcgggcattgttgccatatggggtccgtccaaaggcttaatatagcctgagtttgtatccataattggctgcgcaaagattcgtgataaaacgaatcaccttgtttttttacgggttttttaatgaaatgtgctactaaacacaattcgggcttgtaattttcttttagcttctcatcctgtacgaattgttgccagccagttctaatcctgttgattaaggatgcaatatcttttggagtctttttcggggcaaagcgtccttctaaaatgttaaaatgaggactatcgagacaattaccacatagttggaagaatcgttgatgataatctgattctgaatattttcgtaaatcgttgtctgctattttttgaaattgctgaaatccgttttgtcggatctgttgcaccaagaaacggttcattgtgcctaaaatcagtaggtaatgatgaaaaccttgtgccagttttggatatcgttgctcggcctgtttatcggctaacagattcagtatttgaatatataatttacattcatatattatatctgtatctgtaggctgtgtatccttacatgacgccaaagggtgttgtcctcgaatgaggtttgctccgtattgttctatcagaatatctgaatcaggaaacataggtgttggttcctgcgaatgtgcatgatcgttgtgggcaataatgagggtgaaataatagcgtaatgctcgagcgtattgtaacagtttggataattcatctgcatctttgaagacgtattcttgttcattttgctctctaacgcgttggttttttagtgattgtttgtagtatttgcgaaaatcatgaggattattcaatgcatcttgccaaacgatatccgtttccgtcgatccgttcaggtgaatatgcaagtcattgaatccctttgaatattttttttgttcgttcaattctgatatgtccggtgatagaagcgctgtatatttgatattttggaaacaagaaggcggaataatagttgtttctttgtattttccccaaaagaaagctgcaattaatggtaatggaggacaaaaggtgagtaattcctgccattgctcgaaacgctcacttttgatatgcattattgaatttttttcttgtatatatagggatgctaggttgcccagtccttgtgtcaacagtttagaaagagaatcgatcccttgttcgtccacttgggcaacaagcgcggatcggtacaagtggtcaggaatagttggatcaacctctcgttcatttaacattaagcggcgacgaatatccatccatgacacagagtctcctgccgcgtaatcacgcagagtcaatctatccatcaagatctgtcgtaaacacaaatctaccatttactactgttttttactgcatttaatacatccgtaacgacttggttgtataccattttatttgtaaaaatcgttttgatggccttttttacctggtcggaactcagttgctctttagacaatcctatttgttggaaatagtgcattaaggcatctatatgctcctgattattggcacgaacataggcatcaatcttaataggttgttccctatgttgcttgattgcccctgaaatgttgagtcggttaaggtagttatatacggaatagaccgggtgtgtgtttgttgtctggtccaatagggcaggatcgagataggcttgaatgagaggacaactcaacatgaactcgaacaatggacaggataccgtcttttcattatagttattgaaaaatatcttgtccgatccggttggattagttagagtcatatgagccgttgcatctcgttccatggcttcttcaaccaatattgcattcaggaaaacgaccaaaaatctatgaaacaaatcagctactttctgattgggctgaggctgaatgcgcataaaagaatacacggttctaaccatgattcttcccagtagataaggtggtataacatatggtgtataattttgccaattttcttgccactgtcgtattttcaatgcaaattctgcgattgaattgtctgctaccacatattctgggtcgttgtagtcttcgatatcatctgtaatatcgttgcgattattctgattgaaagctaggggaaattcccgtaattgagccatgcgtatcaattcattttgtatacccaacatgttctcattcaggataatatcgccgatagctcctataaggctgtaaaacgaatagaaaagacgattacgtcccaatggatcctgggctccaaaagcgggaagaagacctaatagccgaacgatttcagcattattagtgtgatcaaaaacttcatctagtgcaaggtcgttctcgtctcgtttatttttggatttactttgcaacgatctaattggaattaatccgttatgtactgcgtcttcattattgaacgacatgatatatgcactttgcaaagaagcgattttttttagtccataatcaaataggctgcgactgtgctgtacgaaatcatgtatatttggagaagtacctaccattggccaccttgttgctttagcaacgatattggatacacgtatgatgtgatcgaacaactcgtacggtttgagtgttagtttctcagatagtacagcacctaaagctactacggatccatctagtgaagggttgttcagttttggaaaaaattggcttgcttcgtcaaggacattattatccaacaagaagcgtaatagataaatattggctaatccatattcgttaagaagctcccagatatccaccttagtgtagtgaagttcattataaaacacatcggatattccttttgccaggttctgcaactttattctgagatcttgcttctggttttgagcgatggagaaaagttgtaagagtgacaattgggtacgtaaaggtaagctggtaaaaaaacgcacatatgataattgggtcatactacctgatattccccatatatcctccaactgttttgagtaatatttccccaattcattattgacatcattattgttaatataaatctgaatttttttcgtcgccagttttgaagccaaagttgataaagtaatgcggtattcaggcttcaaaagtttcatcatatattggctttctaattgttccactaactccggatacttagcagtatagatagtttctggcttgtcatattcgtttttgagcaatgcttttccgaagtttttccattgctttttcctaacaagaaaagaatacaagtccaaatccccgctgatgaaggtcagtatattgggagctgtgagatatttacgcagggtttctaataccggccatcctttagaaaaatccgtatcgacatcgtcgaaagctattagcaaaaagtcttgtccgagtaattgtaaagagtaattaatatagtgcctgaaatgttcctctaatctattcgctccactgacccgtcttaatccgtcgcgcatcacgaatgttgtgtcgttccaatcgctagggtctaatcccccgttgataccatccagcatggggagaccggctgcaaggctatttaaacattcctcccattgtttgtattcccaactttgtctgatagacatctctttatcttgcaccaatacgtcaatacgctccttaacacgagctacaatattgagaaaaatatgtcctttttcttcaattaacgttggatcgacgatatctaaaatttcaattttatacttgtcaggctgacttttaattttatcaattaaagtctttaaaaaagatgtttttccgctacctcgactaccggataaagttatggtatgatgaactcgtcgtttgtcagttatagactttgtattcgatgttgactctaatagagtctgttgattagcttcttgtatgaattgatctatcaaatccaatacctgctggagctcagcctgatggacaatattatttcccgtgaaaacttgttcatgaatatcctgttcaggccttaaaattatttgtttgttcgtcataaccaaaatgtatgttttaggtttaaatataagaattaatattcaattcctctaaaaattggatatagtaaataaatacattttttagacgaggtaatctcggataattaaagataaagttactttcgcgataaatcaaagatttaacgtattttataggctctctccccatagaaggtaaagagggaaaaatggcagttttgattctgaatgccccgtcttcaaagatagggtatgccgaggggattttcccaaaatgactgtaagattgaggatggactcacggatattttcaggattgttgcccgttatcttgagcaaacctgatgagtgttttgtctgtccttacaccaaattgcttattattgcagtcctataaagtttttcaaaccatcaataacttattgatatacataaaattaagcagcagcattaacaaagaggcttgtccataagaataacactgttaatcagcctattgaatatgtttatcggacactaatgattgcttataagtttttacagccaaaagagaaaatggtcggaaccatttagccatggcgcagccatctcttttcttcccttattttgactttactttaatgaacgtatatattgaatacggggataaagtaaagttgcggcaatctgtcgaaccataccatcagaagaaaatcatattcggccggatctcctcaatcatcttttgcggcacttcgcactcccgggcgatctccggccacatggatgccgcctggcaaacctcgtcgataatccgtgcggcattcttgatgttgttcttggccgcacattcgagcaggtcgtctttggttataccgctgaatttgccgtttatcgacatctggtgggccgaggtccactggccgtcgggattgtaggcgtagcccatgtcgtaggccggagaaaggtgccattttccgcctctgtccattaggaacgagatgtttttcgtgtgatcgtcctggttgcgcaccacgacattgaacaccattctgcggaacatctcctgcgcctccttgtaggtaagccgcagcccgcgcatcacggcgaatgcctgttcgtaggagtaggccctgagaagccggtaatcgaagtgcgcgataccgcagagtgtttgcatgtgtacctttgcaccgtttatccggtcgaacctctttgtcaggaaatgggccctcccgttctcttcgatcagcgagcattccgccatgtcgatgccgcattccttcacaagacgtgagaaggagtattccagacgcccgaagttctccgtctccctgaatccggccgtggcggatacgccgtccagcttgatgatgtagtagtcgaacccatcgggagcttcgacctgtcccgaacggatctctccggtggttttgttgtaggcaatgattgccttggctcgttgcccgccggcagaggtgccgaggcgcagaatttctgcaatggcagcctttttatcggaactgatgttcacattgaaacttgatttgtcggcaagggcttctctggctacatccaccagcgaatcgacctctatccggatatccgtatctacggcatcgatggctggctcgaattcaagggcacccatgcagcgtttgcccagaaagcaaagcgtctcgatcgcattgccgctggtccgccccgtcagggccagccatctctcaaagagggcccggccgtatgtatccggcagggagtccgccagcattccgggcaggcctttgaaggtcgttttgtcgagctccccgaaactgtacacacgtccttcccttacgggcatcatcagcggcgaaggctctatgccttgtcgcacaaagtccggatcgtactcgaactgtgcgatttcatatctttgatcccaacgtaccgagcctatgggctggccgtatagattgacacgagctacatctaccattccgattcctccttattctcttttgtgtaacttttggatgcccgcttgcgcttgggcttgtttgctttgctggccaactcgtagtattcattcggactcaactgctcctcctcgacgagcgggacgaagatgtcgagcttgcccagggtgcgcaggacgcggatcagcgactcgaagttctttacctccccgtcctccatgcgctttatggtggagatggaaacaccgctcttgtctgccagctcggcctgcgacatgttctgcttcagacgtactgtttttattttggctgcaatcctgttgcaaagctcggtatctgtcagtatgtatatattgtccaacatctcaaatatgatacgtgttgtggcaaatataagaataaaagtccataaatgaaactttgttagggatgatttaggtggtcgtcaacttatatgtcgtgaaacttgttgttttgtacatttggctcggaaaaatattttgcagccaaaagaaaaatggctgagaccatttttatggcgcagccatctcttcttttccattattttgactttacttattgaatatataggaatacaatgataaaagaagctttttttctaattgttataaggaattattgtggcattgattaaaggctaattgcaagtggataagcttgagccaagaaataggttacatttcactgtttgagagataagtcaagaggttgttgaagtttgcagctttctttgcgagtttttttcacgctaaacttagtttttattgttggaatatttgttgttttgacgacactggtgtatttttgtactcaaaaggagtttatatgattgaaacattcaccgtaaaaaactatagaagctatagagataaagctgaattgtcatttgtagcttcgaaaaaagaaggaagtaagaccaacgatttaccacctatttggtataaagaaataaatgggaagcgtatattacgtttgcttttgtgtgtgggtttgaatggaacgggtaaatccaagatgttttctgcattgaattatttgcgaatgattgcaaccgccaaaccgcaaaagccctctgataaacctgaatacagaccatttctattagataaatcttcatcaactcaacctacggaactttcgttgatatattatattgatggtacttgttttaattatgatataaaagtatcgtctgagtgtattgaagaggaagagctcaaattggtacaatcacgaagctcgcgtatattttaccgatatcacaataaagaattagataaagttgtaataaattatggtagcgcatgtgatttatctaaatctgatcaacatgatttagaagttaatacccttgctaatgcgagtgtgctttcgacatttggagcattgaacctggaaagtcaaattctatctaagaattttgattattttgagaatcatataagtatgattcataggtcggataaaagtttggcagataagctacaaacgggtgatcctgaaaaagatagagttttaaaaaatttgcttttgcgactgctgaatgatgttgggaccaatatttgtgattatgttatagaagaagcgagtttaaatatttcagaacttatagcaaatggagctccggatattgtgattaaagctatgatggaacaatatccctcaggagtaattacccataaaaatttacggtttatccattctacaaaagatgggaaaagtggattggattttgatctggaatctttgggaacaaagaatattatcagattattggtggttttgtatgatgtggtcgtcggagagaaatccacttgtattgatgaaatagagtatggtatacatactaaagcacttgcatttattctgaaaatgtatttaaccatagcagagaattgtcagcttatagttgcaactcatgatctttcgttacttaatgctgatttcttaaggcgagatgctgtaagactctttgaaaaagatgagcatggttcaacctgcgtccgacgtagagattatttgcataaaacaataagtttttataaaacctacgaaaaagaagtttccccacaacttgatgaactaatgcgtaaaatagagatatttattaagtataaagacgatattatggaatgatttgtaagaagagcctaaatataagttttacttgccccgtaaatggggcaatttttattttatagttgcgtcaatcaaacagaaacaaatatttaagcgattatgtattaatgagatcgttcgtttggagtgaataaataaaaagatgatattctgtatggtgctaatggatcttcctaatattcaagaacttcggagtgctatcccacatggcattaccataataaaaaataaagtatagctggttgaaataggccatagttttgaaattaaatataattgacgacctatttggatattgcaattcgtagtgtttaagaaaggccgtagtaaaaatctgcgataacgaagccaataattcaaaatatatatccagatcatcaactaaatatgttaactttgtaacaatatattatggccaaattaatgaaaaaaacaaaatcatatacattcatagacttgtttgccggggcaggaggactttctgagggcttcattagagccggatatacgccaattgcgcatatcgagatgaataaggatgcctgcaacacgctgaaaacacgatcggcatttcattatcttcagaaaaatggaatgctttcgatctatgaagattacctcaggcacaaggaagaagggactgacgggcgaaaactctgggaccaagtccctaaaagcgtaatcaataccacgatctgcgcgacaataggggaaaatgcgattgatgatattttcaataacgtggacgagctcaaaggcaaacgcaaggtggatatcatcatcggtggtcctccctgtcaggcctattccgtcgccggcagagctcgtatgggcaaggaggtcgagaatgatcctcgaaacgagctgtacaaatactacgttcgatttatcgaccactatgatcccgagatgttcgtattcgagaacgtattgggcttgttgacagccaaacggggagaaccctttgcggatctcaaacgactggttgacaaacttggctatgatatggactgcagggttcaggttgcctctcaacacggagttttgcaaaatcgacagagagtcattatcgtaggctggaaacgcgccgtaaaagggtcgaaaagcccgtaccattatccggaactgcccgaggaaaaatgtccctatcaggtattaagagatctgttctcggatctgcccccgcgaaaggcaggtgaagggaaattctgcgaagccgtttcgtacgtcaagcccttatccgaaatgccgtacctggaccagtccgggatacgcggcgaacttgattttacaacccagcatgtagccaggccgactaacgagaacgatcgtaaaatatacaaaatagccgtcgagaggtggttgaatgagcaccaccgactgaactatgcacaactgccggccgaactgcagactcatcgaaacaaggagacctttctcaaccgcttcaatgtcgtcgatccttacggatgcagtcacacggttgttgcccacattgccatggacggtcattactatatctatccaacattatcgccgacattggaaacggtacgctccatcacggttcgagaagcggcacgtcttcaatcatttccggacgattattattttgaggggagccgaacttccgccttcaaacaaattggcaatgcagtaccggtcgtacttgcccaaagaattgcggaggccatcaaaaaaatgttgtagaatttaccagacctcttcaacccgacaataaaaccagcatgcaaccatggacttctcctctctgaaaacagcaccagccattccgggggccgcagcaatgatcgaaacgtttcgagccatcggctacagtctggaaacggctgttgccgatattgtggacaactcgatatcggcatcggccaggaatgtgtggatcaatcggatctggaagggaggagattccatcgtaacaatcagggatgatggacacggcatgtccggagacgagattattcaggccatgcggccaggagcacagaatccgctggaagaacggtcggcaacagacttgggacgcttcggtctcggtctgaaaaccgcctccttttcacaatgtcggacactgaccgtcatgagcaaaacccagggacagtcttccgaattctggacatggagtctggaccacgttgctcaatgcgacagatgggaactggttcattggcttccagaaggtttcgagcatgaactggatgaccttgcatccggcaccatcgttatctggacgaatccggatcggattatcccggccgcgacaaaagccgagaacgagaatgccaaaagaaagttctcggaggcgtttgatcgggtcaggaagcatctttcaatgacctttcaccggttcctggaggccaaatccgtcgcaatacactggggcgggcatgaaatcgacccgtggaatcccttctgcccaaaggagagcaaggtccagatcatgccgtccgaacaaattggagagcaggtaaccgtaaaggggtacatcctgccacacaaaaacaacttctcttcggagactgcatacagacaggccgagggaatcttcggattctccgcacaccagggattctatgtctatcgcggagaccgtctgctgctggccggagactggctgggactgtttcgcaaggaagaggcctacaaactggttcgaatacaaatcaatctgcccaacagcgtggattccgactggcagatagacatcagaaaagccaaagcggcgccccccgtcggatgcaggcagcagcttgaatcctatgccagacaggcctgcaacaaaggatccgaggtttacagacaccgcggacgtatcctcaggcagcgggccgggcaggaatttcaaagtctttggctggaaaagaaaaaggacaacaaatggtctttcgtcgtcaatcgggaacatgcgcttgtccgtaatattcgagagcttgccaaagagaacccggaccaggctattgacatgctgctgaaattcgtggaggaatccatacccgccaaaaccatctatgtgcgggaggccaacgatgacgacagccagaaacaaccctattcggacatggatcccgggttgctccgcacaatgataaaacaaatccatgaaaggcaattggatcagggattgactcctgaacagtcaagactggcactgaaacaaatggagcctttcaacgaatacgaagatctgatagacgaactgcaatgaatgaactgaacgaaaaggccatcaacatgtgccaggtcatgattggattcaagcccggagtaagtgacggcgatatagatacagccatttccaccgtcacaagcctgcccatgtttgccgggttgaacaaaatagagctgaagaaaagcctgttgtccatctataacgtaaaggtggatacctaccagattttggaaggacgtgatgcccgcattccatggttgaaggaattcaaggctgaatgtcgttcggaatggctgttctggacccggtacaagaaatacctggccgaacagaagcattttgcccccgaggttatcttccaattggatgatctgaccgaccgtattctggacaagctgttcaatccacagcgcagcgacgtcatcatcaacaagaaaggacttgtcgtcggacaggtacagtccggcaaaacagccaactatacggggctgatctgcaaggccgccgatgccggattcaacctgatcatcattctggccggcatacacaacaatttaagaagtcagacacagacccgcatagacgaaggttttctgggattcgacacgcaaaataccagagcctacaacatgaaccaaaccatacgtatcggagtaggtctgattcccggttttgacaaagccatcgcaaactcctacacgaccagcaccgaacggggcgacttcacaaagcaggcggcaaatacggccggtttcaacttcaacaatccacagccgatcattctcgtgatcaaaaaaaacgtttccgtactcaagcggctgtacagttggttgaaatcacagtccacccacgatgtcatagccaacaagtccctgctgcttgtcgatgacgaagcggacaatgcttccataaataccagtcgagccggtgacgacccgaccgccataaacggaaatatctgcaagatcatcaagctgttcaatcggtctgcttatgtcggctatacggcgaccccatttgccaacatctttattcctctcaacaaggacgatcttttccccaaggatttcatcatcaaccttccggctccgggcaactacgtcggtcccgaaaaggtcttcggcacttcggctaatcccgatgaggacgatgatcttctgcccattgttttcccggttacggacagcgacacctttgtgcccgcaggtcacaagagagacgatccgaaaccgacgatagatgatattccggaatcgttgagaacagccatcaagtgttttatcgttacctgtgccattcgaattgcccgtggtcaggagaacaaacacaactccatgctgattcacgtctcccgttttcaggcatggcagaatcatctcaaggagattattgaccgtctgttcaaatactacaagagcgaaatagaggcgaatgatccaaccatgctggaagagctccggcagattttcgaggaagacactcccgattaccgttcataccgtaccattaccggagaaatcatcgagtcaccggttctttcccgtatcgacaacaaaatacggagccacacatgggaggagatcaggcctctgctctatcgggctgtacagaagatagaagtcaagtccatcaacggaacctctggagacagtttgacctattacgataacgaaaaaaacggcatttcggtcattgccattggcggagacaagctgtctcgcggacttacgctcgaggggctgtccgtgagctattttctgcgtgcgtcgaaaatgtacgacacactgatgcagatgggacgatggttcggatatcgccccggttatgtggatctttgccggctcttcaccagcaacgagctgaacgaatggtaccgccacataacgcttgccagtgacgaacttcgagaagagttcagatatctggccgaatctggcggaacgccggagaactatgccctgaaggttcgcacgcatccaggacagttgcagataacgtccatatccaagatgcgtcacacgaagaacattcaagtctcgtgggccggtcgtctggtagagacctaccagctgctccgggatccggcctccaaacggaacaatctggcggcaacggacagtctgctttcagaactcggaactccagacagaatcaaaaacgattatctgtggaccggcatatcttccgataccgtctgcgactacctgtcccggttccaactgccggagtccctgaccaaggtcaatctcgacctcatatgcgactatatccgggaactgaacgatgtgggagaacttgtttcctgggacatagcactgatgagcaagaatgcagatggcaacacatgcgtccataccttttcgaacggcgtattggcaggatgcttcatccgtcggcaggcacaggatgcacaaaatgccgggacatactatatccgcaagaaccatatcgtgggtaatccgaccgatgaattcattgaccttcctgacgacatgctgtcgaaagctcttgatgagaccagaggccggaagacccgggctaaagaagagtggaaacacgaatatccttcaccgcagctcgtcagacaggagttccgctccaaacagactcccctgctcatgatttatccgctgaatccggaatattccaacatgtctggagtaaaggatgctgtctcctatacgaaagacgacgagccgttcatcggatttgccatcgcatttccgcatagtgacaccgacaaggccatctcctatgtagccaaccaggtagccgactttgcaattaccgaggagaacttcgacagcaccaacgacaacacttatgatgaacaataactcgataacggacatatggaacaatctggcctcggcagaggaagccggactcaccaaacgcagaattccggttgagtctcccttgtacgtatacgggacataccgatatccggacaacttgtacggtatcgctttctcatatgacagtaggctgaccattccggttgaccagttcaaaagtctgaaggaacttggaatcctgcaaatgccggacacgagtttcgagcacagaaacttgctgctgatacaactgcatcacacggactgtctcggcgtgttctccaccttgtgctcggatttgacaagtgccgtaacccgtgaatcctccgaaaagtccgcacttcgcattgtcctgaatcaacttgaaaagtggagaactcttttcgatcgaggccttgcggccgggctttctccgtccgaacaacaaggtttgtatggcgagcttcatctgttgtctcgcatgatacgtcgaaatacctccgacatgacggaaacggtcggatattgggtcggatgcgacaaggccatgagggactttcagggtgaggactgggccatcgaggtaaagacaaccgcaaccaacggctcggatcgacttacgataaacggggaacgccaactggatgatgcgttgcttaaccggcttttcctatatcatctttccgtagaagtatcccggaaaaacggtcagaccctgaaccgggcaatcgaagacttgcgaaaagcattggcgactgacacgattgcgctgcaccggttcaataccgggctgactcatgcgggatatttcgatgaacacgcgcccatgtaccaggatcgctgctacaagattcgctgggagcaggcctatcgcatatctggggatttcccccgtatcatggaacgggatctgcgcaatggaatcagcaacgtcacatacacaatcaacacgtccgcttgcgaggaatacgcagtgactgacacggatctcttcaaatcgacagttgatcatgaaagaaattgaaaaattctaccagtcccttatgcaggacgttgtcgccatgcagtcgggtgatgaagatggaaatacccaggaacagatatttacccgaatctgtctggacatgctgtccgatgcagccgaaacggagaacgtatcggttgcctacgacgaacgcgatctgaagaaaaagggccaacacaaaataaacggatatgcgatttcggacaactacgaaaccgtggatctgttcatcaccctttatgccaacaccacggagatccgtacgattcccaagagcgaggttgatacggcttcaaagatgattacgaactttttccgccgggccgtatacaacgattatgtcaatgagattgcagaatcttccgaaatctttgaattcgccaatacgctggccaattatgccgaactgcgcgaaaatctgattcgcgtaaatgccttcatcctgacaaacggcacatacaagggtgaactgccagccagccaagtcatctgcggatacaacatctactataaggttatagacgtggagtatctttacaagatttccgaacaggccggagttcccatagaactggattttgagaatcttgacggacacaaatatgaaattccatgtcttgccgccaatctgagcaatcccgattacgaagcatacgttgccattatatccggagaatgtctggccaaactttatgaatgctacggatcccgtctgctggaacagaacgtgcgttcgtttcttcagttcacgggaaagatcaacaagggcataagggaaaccatcaagagtgaacctcacatgttcctggcctacaacaacggtatcgcggcaacagccgatcacatcgaactggatgagacaaggcatttcatcagacatatcagcaacctccagattgtaaatggcggtcagactacggcctccatctacaatacggccaaaaaggacaaggccgacatttcagatattcttgttcaggtaaagctgtccgtcatcaaggacaaggatcaatatgcggaaatagtttcacgcatatcacgctatgccaatactcagaacaaagtcaatgatgccgacttctcggccaacaatccggctcttgtagaaatcgagcgcatctcaagatacatatttgcacccgcgactccgaccaacaatctgcaaacggcatggttctttgaacgtgctcgcggacaatacaagactctgcgggccaaggaaggattcacgaaatcacggcaaaaggcctttgatctgaaatatcccaagaagcaggtcgttacaaaagtagaacttgccaaatatgttaatgcatggcaggaaacgtacaatggcagaaatctggctatcgggcctcacatcgtggtacgaggaaatgaaaagaactatgcccgtttcataaactacaatctcccggacgtcaaacatatcgacgttgcatggtttgaggacacgatcgccaaggccattctcttcaaggctgccgacaaacgatacggtaccaaactcacgggagatcatatcggtgaattgaaacaggttgtcgttccatatacattgtctcttctgaatatcattaccgagggacgactggatttgtatcgaatctggaaaaaccaggcgatatcgtcagccttgtcggatttcatatacgatctgatgaagcaggttaacgaatttattctcaaagaatctcccgtctcgcactatatcgaatgggccaaaaaggaagagtgctggttaaaagtccgctcaaatgaatgggcttacaatctcgatgagattcgtcaggattttattgatgagaagaatcctcccaaacgcaaccacaaaagcgatgttggcgacgaagagtcggacagacggcacaaggaaggtatcatacgggcaatcccgttctctctttggaaaaagatagagacgtgggggcgcgacacggggatgttgcagccgaccctgacctccctggccagcgatattgcatataaaatcaagaacaaccgaaagctgaacgacagcgacatctccagaggatatctgatttacgagaatgtctggcaacacaattcggaacttcttgaggaagccgacagtctggccgagcaggattgtgcaaaagcagccgagacctccgatacaatttctccggcaaacggtcaagacgagattacattggaactgatacaggccatggtagaatgggacaaccgtcgacgaattcttgaagactggaaatggaaagccatgaaggatgtcgctgatggaatgaaaccgttaactgacaggatgaagtatgccttctacttcaacctgcagaagctcaagaaggctgggtttcccaattgatacgcaccatggatatctggagccgagaaaaaagatccgaggtcatgtctcagatcaaaaacaaggatacgaagccggaagttacgcttcgcaaggccctttttgcccgaggatttcgctatcgtgtcaatgtcaagactcttcccgggaaaccagacatcgttctgcctcgatacaagacggtcattttcgttcatggatgtttctggcatggacatcccggatgcaaatatgcatacacgcctaagagcaatacggaattttgggttaacaagatatcaggcaaccaagaacgggatgcagtcgtaaaacgcgaacttgaagaattcggctggaaagtaattatcgtttgggaatgcgagatcagacacgggaaggattttgcgggcttgatagaccgggtatcagtggatgtccttacacaatagcgcttggagaaattttattaagaatattttatcaggtaatgtgaagaagagaacctagacgataagagtcgtccaggttcttcaaaatttatttcctatgcttggttgggccaactttgaccttttcaataacagttgtgctcggatgcgttttagcataggagatgggaacaaattgtcctgttttagcacttctgcctttgtctattgtttttgacatggttaagacgttttgtggttaatattatacggtgacctcccgattccgctacggtgcacttaggtgttacataccaattccctttgcctaccttgtgtgcgactcaggacagcaatagaaacatccatctacgttatagtagtgtttctttgcttctcttatcgcctcactactatttgagaatattcccaagaagagtcgattttcctccgaaggcaaataccgacaacctaacttatgcacttcatgctctcccgtaggttgggcaactttgttcacatagtagaaattattcatatttgaaatgtcaactctctggtcctttggccagggtcttaatttcgagttgacaatgcaaagctacgatgtttttccgatttacacaagtgtttgcgttcaaaaaacacggaaaatgtgtttttgatatttgtatttttgtttgagttgtgtttttgcgtgcataatatggcgtatgcctctctcgtttgcgccttaaatttatcagatttataaaataaatttcccccatatccggcaattctggcggactattagcggccgcaagatgcggccgctttttgtgtgcttgtttcataactttatcgtcttaatcctgttcttgatttcttgcccaaaaggagggtagcagcacgtgcacagcggcgggcccattgcaggtcgtcatcgtccttgtcccgccaagggagatcgctttgcgaacctccgccaccacctccggcagatacggctggcgtatcaagcataccaacaaagatagctacggctatgtcggtcagctcgctgctgttggcaacctcccggtagtcgaactcttcattgaaatagtcaagtacccgctccgggatatagaaacgctgttcccttccgccatgggaagaaagcgtgtatgataccgagccggaacgatagtgagtatagtccatatcggctgccggtctttgaacgggttccggccgatggctctgagaagtattgacctgagcggcaagcctctcccggtagtggagcttttgccaagttcggggaagtttggaaatcatcaggttacgtgctactcccagttcggaggccttgtatttggtatttcctttgaggatcgcatatccacgtagaacatctttcttgtctttccgttcatatacggaatagcctcttcgggcaagtgccttcttgtattcttcccatgaccacgatggcatggttctcaatacctccatacactctctgcttacctccggaatgttgcgacttcgtatttcttccgcagtcttccagccacgtttcactgcgactcgctcggctgcacgttgtgcccgaagatgaatgttatggtcattgttgatgttcccgtttttatcaaaacggcaaattgcagcatggagatggggaactttacctttggattccatgtgcaggtaaaccgtatatttgctgttggccagattggtcgggcaggaacggactttcccgtccttgccggtaatcgtttgtttgtcgaactcttcggcgaactcgtgccagagcttttgccagtcctcaatgtcatagaaactggtatgctcgggcgatggactcaactctattctgattatggaattctttatcggccgatactgggaaagggtcaactgcatggagttccatattcccatagcgtccagttccgggggcaacagattgtccaatacccgatatattttttccggatgctttttgtgttttgattcgccagtaatataacgaaggtcattgatgccgtaagatatggctttggcttttgcaatcatttttcttcttcgggttttggggttgacgggactcggttctgctcacggacggctgtcagaaagtcgctgaccgcctcggcgatggaccggagcttatggaaccatccggccatgaagggaacctggttgaacagagtgagccgctgacttgtggacattccttgaagcgccgaggtgtatttgactaggtcggagcgacaaccgtccagttcctgcaacagggctgcctcctcacgggtgagccttgcccggggtgcgtagccgtatgcccgggacagcagatagttgctcacggtcatgccgcactgttgggcccgtgcctgaatctcttctttctgttggggcgttaccttggccccgatgaataccgttctcttcgcgtcggaagcagtgttttgttctatcgtttcgtgttccatgaaaatcatctgttattatggttgaaaaggtgcgagcctgcgagcagcgcaccggcaacaaatggaagccggcaagagcgccaatgtacaaccgcaacgcagtgaggttataccttggcatatcttgcaacacttcgtgtcgggctttggacagcgacccgcaccggatatacaagggtgattggcaactgtatcgacagcggaggagggcgccgttccggttccctgaaccagagggagctggtaaacagtccctgtgctccggcagttctgctttattctatatatacaccccggcaataaagtaaagtcggaatcaaatccggaggtcggggttgagccggtagacgttgtcttcccgtatgaccatctgttgctcccgtaggaaagccgcaacctgggtcgcacggttgcccccgaactttacgccctgcagctcgtagccctctttgagccgttcctgatacgcgcggtagctgccgatgctgccctccgcaaaaacggcatccaacgctgcgcggtgtacatcctcgggaatgtcgcgtgccgggtcgaacgggcctttggccggacgccccgcgccccgctttcgcggctggtagggctccaccagttcgggcagcgtctcgctgttgatgcggaaagcgaagggctcgaactcgcggtcgcggatatggattgcctccaccacgctgatcgaccgctcctccttgtccacttcaatctgcatgacggtctcggccttgttgttgagttccgtgccgatgtggccgcgggcgttttcatcattcttgttctggtgcaggatggtgtggatgtggatctgccggtcgtcggtccactgcatgaaacgtgagatgatgtcggtcgcttccttgggcgagttgatgtcgtagagcaggtcgcggatgccatctataatcaccagaccgaggtggggaatagtgccgatggcatggtcgacaatggccagccgcatgtcgggcgggaatttgcgcagcgtcagcatcaccaggttgtcgggatcctgctcctcgggcagtcccgccagccgcaggatgcgtctcagcacctgctggcagtggggacgtccctgctcggtgtcaatgtagaggatgccacgcttcccctcggggaaggaggcgcggtagtggagcaccgtgccgttcgtcatggccgccgccgtgagggccgcaacgttgaaggtcttcttgcttttggcctttccgatcgaggcgctgaagttacccagcgtcccgattacggagccgtccacccgcagcaccgcgggcgactgctcgcaggcgtccgctgcccgcacggccgactcctcgatgcagagggccaattcctccggtgttggcgtatggttgtctgtcgtttccatcgcctaccagattttggggttgggtttgcggcggtgcgaggcgatcagggcctcgttctcctcctcgaaactttgtgcgggcggggttttgcgagacgattccagccacttgtccagctcgtcccgatagatgtataggtgcttgccctgtttgatgacggggatgttgtccttcttgaccttgtagtagaaggtcgaaaggggcatccggaggtattcgcacgcctcctgcaccgtcatcgggacgtgcgtgttctcctgcggtgcgttctgacgcgagatgttctccgagagcaggttctccatgcttgcgatacggtcgcacagctcgccgaccaccgtcggcaggtcgttgaatgtaagttggtcctttgccatgtcttcattgtttttatggggttcaacatggtgcaaaccaacggaatgaattcacgcagaccaacgctgacgggaatcattttttcatcagcaggggttcattttttccgatggccgccaatcagctccagatggaaacggaaatcgtcctcgtcggggatgtcgattggaatatggctcgggactgcgacacgcaggttgcgctgcaggtattcgacggtggcgttgttgagttcgtgagggaacgatagcttgatgaaccgggcccgctcttcgagcgagaggtggagccgttcgccgatgttccatgccaggtggcgcagttccggcgaccgcaacgggcgttccgggttggagcgcagcggcaggcaggagtccgtccggccgcaggccatctgctcgatgttggtgaggagggtgtcgagggccttctgcgacaggaagggcgcggttgcgacggtcacatattcgcggatggcctccataagttcggcgtggcgtcgggcctcctgctgtttcatctcctccagcaactggttgtatctttccatatagggatcgcggtgcggcccggcggtgattcccgtttcgaccctggtggcctccttgacgggcacgattcctattgtctcagcgcggttctcggcctgctcggtgacagcagcccgggtgcgttctgttttggcagcctccaacttttgccgattggcggaaggaaagagcgagtattttataagccaacggtagaagtaccgttgcaacacaccgcacaagacgattgataccacaagtatgatgatgacgggcgttgccacgggcgtgatgttgatgtcgtggcataggtaaaggtagttatcgacaacggtaaagaggaccgccgcgagggttagaaccagacttattcttttagcccgtttttggagtgtattagccatatccgcaactgtttgtaatggttacggaggtgaagttataatcgtaattccgaatagtcacaaaaaaaagagtgatagttgcagctgtcacgctaactatcactctttttgtgcgattttcaaacaaaaatcgtactttatccgtcaaacccggccgaaaaccgcccgtcatttcttccgcatcagggtgatttttttgctggcttcccgtttgttggcatccactaccttgatataccgctgtgtggtcgtaatactcttgtgcgccatgatgctctggatggtgcggatgtctgtcccggcagccgcctgcagcgtcgcgaaggttctgcgataggagtggaaggagatgttcttggtgattcccgccgagcggatccactccttcatgtaggtctgggtccagcagcgctgcaatcccttgaagaccattccccgcttgtcggggctgtagccgatcatatccagcgcctcctcgctgatggggatgatgtcctcggtgcggttcttttgggtgacgatgtgtacgcacttgccgccggccgagtagtccacgatgtcctcccaacagagggcgaggatgtcgctgatgcgcaggctggtcatgcaggagaagagcgatgccgtcttcagcacgggcttcttgcaaggtgtttcggccagcttgtagagttcttctactgaaagataatccttgaccacatcctccgtttcaatcttgtccaggaaatcattgacattggtctttatcagcccgttacggtagatgattttcagaagccccctgaatgtagaccaatatcccgatgcggagttgcgcgtgatgcgtcccttgcgcttgagcttgttggctgtcagcaggtattcgcggaacttgttgcagaggtcgatgtcgatctcctcgaaggtgcacttgccgtgtacgaagttgcggaagtggaggtagacgaactcccatttggggtcatgtttacggagctgactgcggaaatactccaggaagtcggccttgagcttgtacttgtcgaaaaagtcgtagcgctcgttgaccaccgactcgaagcggcggcagcggattgcctcggccttctcggtcatcacctcgttgaagttctgttcccgcttgttcttcgggtcggcatagaggtagatgcccagcgtttcgtggcggatcaccttcatggtctccttgtctcggtagccgggataataatccaggtagaaagacaacatccgtcccttgagcgggcgggttctcagtgttacggttttacattcgtgcataacatgaaaattttatggttaatactgattttacggcaaatgttgggaatgagaacatgcagaccagcgtcagcgataaatcattttgcatcatttcccgcggactggaattggggctactttttgactcccatcacgcggtcgaactccactttcaggaagcggacgaagcgcccgttcttctcgcgggggatctggtggaactgcagcacgccgtacaccgcgtcgcgcgagaggttgaaccgctccatcgcttccttgacggtgtagtattcggccttgctctcctccgcgctgctcttcgagaggtcgaagtgcagcttcgagtagtagatctgcccgtgctccttcttggaggggatgttgttgcggtagacgtgcgagcggatggcgatgcgggtcatgccgtactttccctgaatctcttcgggcgtgtaccactccgttaggtcggaatccacctcatatttggcaaaggcggcgtcgatatgcttcttgctgtaatagttgaactggcggatacgcaccttcggcaccttgtgctgccgggtgtaggtccacacccatttggtgttgaccttgtacttttgggcaatctcctcggcggtatagtattccgtgatgtcgaagtcatccttgggcataatgcgctcgtatggcttggttttcatcatcagctcgatgtccgcccggcggatgagagacttcttcccgctcaggcgggaggcccgcagtttggactccttgaccagcttataaatgtattgccgggtgacgcccatcagctttgcggcctgggcgaatgagaagaagtcctgcccttcggcagcttgtcgcggttgaagtaattcctgcgcccgcttcaactgacgtcggcgttcccgaatccgctccttgtagcccaggttggaacactggtggctgcaatagcaggttgttgttttctgtgcgatgaagggttttccgcaccactgacaaatctttctaacttgcatcttttcctcctttacgttgaccgtaatttcgcctaatttctcccggattttgtcaacacatgtaaaccactgtcaacacacgtcaactactgcgtcagtgtgatatttcggcttgcgtggaatttgctccgcggtagaaatatggtaggaaaatatggagaaaatctgtgatctccaaacgacacttggaaagcacacaaaaacaaaagtcgctgatatacagcgactttattctaaatggttatgattggttacggttgtttacaagccgttacttgccgatgcaaaacttggaaaatatggtcccaagtatttcgtcagtagagatttgaccggtgatttctccgaggtagtgcatgcattctctaatgtcttgggcgaggaagtctccggagaggccggattgtagaccgttgagggtacgtaggattgcgtcgtgggcatttagcagggcttcgtaatgacgtgcgttggtgacgataatgtcattttcgccagtttgtgttgactgtatggtatctgtaagctgtttttcgagtacgtcgatattttggtcatgtgaagctgaaagaaagatgaacgaagtgttgggcttttcacgagtgaggcgtttgtataggtctgtgagctgttgttgggttgcggatccgatcttatctattttgttaaaggcaacgatgaggcgtttatctgtgcagtgggggaggactcttccagcgattttttcaatgtcttgtgtcgatccagtggcatcaataagccagatgacgatgtgggcttgatctagtttttggaaggtgcgttcgatccccatattctcgatggcatcgtgcgtttcccgtataccggcagtgtcgataaagcggaaagtaattccttgtaatacgacggtatcttcgatgacatcgcgggttgtaccgtgtatgtccgagacgatggctttatcttctttgacaaggcggttgagcagtgtcgatttcccggcgttggtttctcctataatggcagtaggtacaccgtttttgatggcattgccgagtgtgaacgaatcggaaaggcgcttaatgactcgttctatttcactggcgaggtcggttagtttctcccgatcggcaaattctacttcttcttcgctgaaatcaagttcgagttcaacgagcgaggcgaatgtgagtagtttttcccgtagttggataagttctcggctgaatcctccacgcatttgttgcatagctaaacgatgcgaggccgccgaggtggaagcgataaggtcggccacggcttcggcttgtgagaggtcaagtttcccattggtaaaagccctacgggtaaattctcccggttgggccaggcggcagcctgctcgcaatagaaggctgatgatttgttgttgaatgtaaatcgacccgtggcaggatatctcgactgtatcttctcctgtaaatgaatggggggcgatgaaaagcgtaacgactacatcgtcaatgggagtttcgttctcatcggcgattgttccgtagtgtgctgtattgggctttgcttcggatagttttttcttgtttgcggtgtgaaatatacgatcggttataatgatagcgtttgttccgcttatgcgaattacggcaatacctcccataccgggagcggtagagatggcgcaaatcgtatcttcgggtattggcttgtttagtttaagttccatatttcaagggataggtcgctttctattttatgttcaatactgtcgggtaagttgtggaaaaaatctattccggtcactcgttccacactgtcgatggtgattgccaactcttttagagacggttgttccgcttcattgtcgaatataaatgcgattcctctgggcgtgccggtatacggaacagcgactactttgaaaaagcgggcagggacgactatctcgtgtcgtccgattgtctttctcggagtagaaacgatgggtccgcaagtaatgagtagtgcactgtctcgttgtacccattcacgtatttgttcttccagctctttccagcgacctcggtttaattcgggaatttgcggacagatgtttgagagcaggaacgattcttccattgctgtttcgttccatttcatatcggcagccggagccatatgtccccggtcgtatccgctatacgtgtaatcacgggtgtctatcattgtgcccactacatcgtagtcgggggtaaatcggttgttgcgtgtagcactaccttgcagttcgtcttgtagtaattcgtaacttacccagttgggttgtttccaatgggagttatacgagaccgtgtagcccgtacggtataatatttgttccggtgtaccttcgggagtatgggccatttcagcatcttttacatgacaaagagagtttgtaaacgattgttgaggattttggggttgttgagcttgctttattagccaccatatactgtatgtaacgagtaatagcagaaataaagccccccaattatttatttttttactgttcgattttttcttttttctctttttagccatatcctccacttttgaatgtggtcgtgcaaatgtaagaaaaaatttttttacctttgttcgtcggttggataatccatcgacttaggtttagatcaagaaaaaccaataaaaatatatacgatgaatttagtagatcgtttccttcattatgtgagcttcgatactcaatcggacgagcttacaaacttgactcctagtaccccgggacagatgctgtttgcccaaaaactggccgaggagttggagcgtataggccttaccgaggtgacactcgatgataacgggtatcttatggcctcattgccttcaaatatcgataaagatgtcccggtggtaggatttatagcccatttggatactagtcccgatatgtcgggacggcatgtgagtccgcggattgttaaaaattacgatggtaaggatattgtattgtgtgcagaggaagatatcgtattgaaaccttcggagtttcccgaactacatcattatataggtcaagaccttattgttacgaatgggaagactttgttgggggcagacgataaagcaggtattgccgaaattgtaacagcgatggagtatcttttgaaacacccggagattaaacatggcaagatacgcattgcattcaatcctgacgaggagataggcaaaggagcgcacaagtttaatgttaaagcctttggagcagattgggcctatacgatggatggtggtgaaataggcgaattggagtatgaaaactttaatgcggctgtggctcgagtgactttcaaaggccgtaacgttcacccgggatatgccaaacataaaatgataaattcgattcgcatagccaatcaatatgctattatgttgccgcgttgggaaactcccgaacataccgaaggttatgaaggtttttatcatttgatttcgttcgagggtagtgtggagaagacggtattgacttatattattcgtgaccatgatcgagatcgtttcgaacgccgtaagaaggaactcgaacatttaactcgtaaaataaataacgagtttccgggttgtgccagtatcgaaataaacgaccaatactataatatgcgtgagaaggtcgaacctgtgatgcatatcgttgatttggtatccgaggctatgagggccgtagatgttgttccgatggtgaagcctgtacgtggcggaaccgatggagcgcaattgtcgttcaaaggattgccttgtcccaatattttcgccggtgggttgaactttcacgggcgttatgaattcgtgcccatacagtctatggaaaaagctaccgaggtgattgtgcaaattgccagaatggtagccgagaagtaataatctttgtcgggtttggacagatatggaaattattttccatatctgtcccatttatttcatagcgaaaagttcatgtcaggcacactcattgttcttacagggcctaccggggtgggaaagaccgagcttagccttcaattggcagagcggtatgcttgtcctattgtgtcggccgatagtcggcagttctatggcgatatacctactggaacggcggctcctacaatcgagcaactgtcgagggtcgaacattatttcgtaggacagttggcgttgtccgactattatagtgcttcgtgttatgaagaagacgtcttgaagctgcttgataaacttttcaaggcaaatgactatgtcctattgacaggaggctcaatgttgtatatcgatgcggtttgtaaaggtatcgacgagatacctaccattaccgacgagatacgtcgtgaggttgtggcgcattacgagaaagtgggtttagccgtcctttgcgaagagcttaaagtgctcgatccagtatattatgcagaggttgatttgaataatcacaagcgggtgattcatgcgatagagatttgtcgacagaccggtggacgatacagtgatctgcgtactcgtcgggtgaaatcccgccctttccgaattataaaaataggattgattcgtccacgggaagagctattcgagcggataagtcagagagtggaacaaatgattgccgatggcttggtcgatgaagctcgaagggtatacccttatcgtcatcttaattctttaaatacagtgggctataaagagttgttcgcttatttcgatgggaagatgaccttagaagaggctgtcgagaaaatcaagagaaatacccgggtctattccaagaaacaagtcacatggtataaaaaggatctcgatatgaagtggttctccccagatgataaggacgggattatcgcttatatcgacgagaattccgttttgtgaaagactaatgtgatatttgtttatacgtgatctcgaatggtatctttataaaaaggatacaggatttatatctataaagttatgagaatattgaagccttttatgttgctagctgttattggtgttttatattcttgtgcagctgttcctttacagacttatcgcaatggctatatcatggataagaataatgtagttgtcgggtactattcgaatgggcatgtcctcgatttggaaaagaatatcatcggatactatgcaaacgggtatatttacgatactcgccatgaggttataggaaattatgtaaatggatatataaagaacctgaaattaaaataggtctgatgtaaatttcatgttcttatttacttgaaggttgggttcactggctctatctggtattctgtcacccctttgttgtattttgaagatatctcatgggctttttccacgaatcctttcagatgaggccgatggggatgctctttcaattcttgtatcgcaggtactacccggaagttttctttttgtatagttggtcgtcgggtataaacaagtgtgtgttgtgccgattgtaacagtatttttcccgtgatatcccgtcggataacaacctttaccattgctccacccaccgtatcgcgggttttcatattggagatgaaatttcccagtgaatagacgatgagggcacaagggttcccttgttcgtcgtatcgtaattccataggttgtatcacgtgtgggtgggctcctataatcagttgtactccttctttcaccaaaaagtctgccaaatcttcttgtcgtttgttcggcaacagttggtattcatcgccccaatgtaggcagacaacgataaggtcggcactcaacgttttagcacgaaaaatgtctttttttattttttcttcgtctatgtaattgacaattaatggagagtgtggcgtaaatccattcgttccgtacgtgtaattcagaaaggcgattcgtattccttttatagaggttatgaacggatagaatctttcgaatgagtcttttgaatcgtaggtccctatatggtctgctccgatagagtcgagtatatgcaatgtgcgtatagcccctcgggtataacggtcgagacagtgattgttggcggtaaggaaaaggtcgaatcctgcgttttgtaatgcgattggaaattcgtccggcgcagaaaaacagggataaccggtgtaaggttgtccgccgatgggtgattctaaattgacgactgcataatccgccgcagctatttcgtgagtaatgtctgcaaaacaaggtgaataatcgtatgcctcgccttgttttgcagattgtatttgggctttatgttgcatagcatcgccagcgaaaagaagagaaacttcggtagcgggtactaccggagcttgtcctaaaatgagcggtgctaaaaaagatataagccctatcatacgagtttagggatagattgcttttttcccggccaacagggtgttacgcatgagcgacacgatagtcatagggcctactccaccgggaacgggggtgataaaagagcacttgggagctacttcgtcgaattttacgtctccggtgagcttgaatcccgatttttttgtagcatcaggaactcgggtcgtacccacatcaatgattacgacaccctcttttaccatatcggcagtgacgaattcgggagaaccgagtgcggcgataataatgtcggccgtacggcatatctctttgatgttgggggttgcactatgacatacggttaccgtggtattgcccggataagccttttgcatcatgagtgtagctaccggtttgccaacaatgttgcttcgtcccagtaccacacaatgttttcctttggtctctatttcgtagcgggcaagcaactccatgattccggcgggtgtagccgatacgaaacagggcaacccgatggacatgcgccctacattgaccgggtgaaatccgtcgacatctttccggtagtcgatagcttcgatcaccttttgttccgagatgtgtttgggcaagggtagttggatgataaatccgtcgatatcggggtcgttgttcagttcgtttactttgttcaagagttcttcttcggtaacatcgctttcatagcgaacgagagtcgatttgaacccgcattgttcgcaggcttttactttgtgcgccacgtatgtttcactcccaccgtcgtgtcccaccagaacagctgctaaatgaggccgtttgcctccggcactgcaaatatattctacctcttgggcgatttcttgttttatacggtcggccaccgcttttccatcgattagttgcataatattgaggttttgtaaaaaactaccggacacactcccttttttgcctatcggcaatcgattagaatcgggagtgtatccggtagtttcatattgagtgattaaaattatcttcttttgaatcctttcatcatggctcctttgttttgggtaaccattcgcatcattttgcgggtttggtcgaactgcttgataagtcggttcacctcttgtatcgaagttccgctacctgcggcgatacgttgtcggcggctaccgttgagcagttcggggttgctgcgttctttgggggtcatcgagtaaataatcgcttcgatacttttgaaagcattgtcatcgatgtccatgtccttgatcgcttttcccacaccgggaatcatagaagccaaatctttgagattacccatttttttgatttggtgtatctggctgaggaagtcgttaaagtcgaattggtttttggcaatcttcttttgtaatcgtttggcttcttcctcgtcgtattgttcttgggctcgttctaccaaagagacgatatcgcccatgcccaaaatgcggtcggccatacgagccgggtggaagtagtctatggcttcgagtttttcgcctgttcctacaaatttaatgggcttgtcgactacggtgcggatagagagtgccgcaccgccacgggtgtcgccgtccaatttggtgagaactactccgtcgaaatcgagacgatcgttaaattctttggctgtgttgaccgcatcttgtccggtcatggagtcaacgacgaacaaggtctcggtcggattgatttttttcttgatagcctcgatttcgttcatcatttgctcgtcgatagccaaacgtcctgccgtgtcgacgataaccaaatcgaaatgattttctttggcatattttacggcattggcggaaatgctcacagggtctttgctatcttcctcggtataaaccggtacatcgatttgttcacctaagacctttaattgctcgatagcggcagggcgatatacgtcgcaagcaaccagcaaggggcgtttcccttttttcgattttagcatttttgccaacttaccggagaacgtggttttacccgaaccctgtaatcccgacatgaggataatcgacggattttgcgacaggtttacttcggcggtttctccacccatcaaggtcgccagttcgtcgtgtacgatcttcaccatcaattgtcccggcttcacggcggtgagtacgtcttgccccaatgctttggtttttaccgtgtcggtaaattgtttggctactttgtagttgacatcggcatcgagtagtgcgcgtcgcacgtctttcagcgtttcggcgacgttgatttcggtgattttaccttcacctttcagtattttaaaagaccgttcgagtctttcactaaggttttcaaacatagttttataacaatatttttacacagatggataaatcgttgcgaaattactcaaaatcgtcggaatatgcgaataaaaatataagaataacatctttgaacatacgactatataagaaagtcggtatatgagtagaaatttgaatttaaaatataggtatttaaaaaatatttactattattgtgtttggataaaaaatgagaggaacgtaaatctttggagaataagaaatgaccgtttttttttgtaaataaaatattgattttaatgacgagtatatgaaaaagttttttcaagttttaggaattgtcactttacttttagtgggattgtattacatagaggaatgttctggaaaaaaagatcaatcagaagcggtagaagatgtacaagatgacttggagatggaaaagtctgttcacttgaaatttaaaggagtacccatagacggaacattgaaagaatttatttctcgaatggagcgtaaagggtttgaacatcgttcgtcgtatgattcaaaggaacggctggtgggtgactttgcaggaattaaacagtgtacggtttatgtggaaacacttgataatagcgatttggtatctcgcattattgtcgagtttcccaaacaggaacgatgggaggaattgtttgacaattataaaaacttgaaaagtatgcttatggaaaaatatggaaacttttcatcgtgtgttgaacgatttcaaaattcctatatcagaacagatgaagatcgtatgcgtgccgttcatatgggtgaatgtatgtataagaccaatttttcgattgccgagggagatattacacttagtatagattatgaagaatggaggcaggggtttgtcgtattgaaatatcaagataaaataaacagtgcgataattagagaagctgcgatagaagatttgtagtaaaaacaacggagttgataaaatttttactatttttgtagacggagagggaagactttctccaagacatgttagaaaaaaagaagcgttatgcttatcttgtaacttgagaacctaggaaattcgcgagtcgtaacacaagagatggcatagtggttctcacgctatggcgtgagctgctattatcacattcgtgttacgggttttcctaggaccttcaagttagaacgtggcatttgcagtctcacgcttcgtgtataaaaatggtccttgtggagactgggggacgaaagaaaatttttatatgaaaaaacttatttttttattactaattgtaataggtttttcttcttgcgtattaaatagaacatatattagtgattacagggagcaaattcgtttgatgaaagctaatttcccagaaatttatgaattgtaccgtcaaggtgatgttattataacttctgtttatacttatgaaaaagacggtcaagaaagggtacatatagagtatcgttatagataatctattatataaatattatcatactctgtttgagaatagaatatgtgtaattatatgaaaatatgtgattccgaaccgttatatcttcttcactttccagttcgcttttttgaaaaagaggaacgataggaatagtttgaatccccaatagacgtactctactgtccaacaaaaggctatgtctacttgaagggtaacgataatccaataaatagccagcgtatagaaaacgatcgtgatcatttcgatgagaaaagccgtgcgagtgtcgccggttcccgatacagattgaaagagtatatttcccggtagggctataaggtagaacgacgacatgacatagaccgaatgtgtacattcggcgataagcgagctatcgttggtatagatgaggagtatccaatgaggagctaagcatagcaaggcaatgaggggtaatactatggcgtagcacattttgacgatacgccgcatgattggaattacatcgtcggcacggcaggctcccatagcattgctcacgagggtacaggctgtcgctccaaaagcattgaccggcatgaacagcagggtagaggtactgcggataatgttggaaatggccagtggaagttctcccaaatgttcgacggctacgaaaaagagaaaccatgtgcctatggtgagaaagtagagaatcatgctccataccgatacattcagtatttcgcgaatgaggccgaatcctccggaacgaaatcggaacagttggtattttccccgatctatataaaagaacgtgtagaggaaaaagtgcaatgcggctgtcgcttctgccaaaacggatccaagtgcagctccggcaatacccatttcgggtgcaccgaagtgcccgaatacaaaaatgtagttgaatatgacattggcgacagtcatgatgactgcattcatcatcagtactttggtgcgggtgacagctacgaaaaaggcccggaacatcaccccgatagaagtgaataggagcccgaatatccgatattgcatgtaatcttctccggcttgacatacggcagtggaggagatgaggactttcaacatttgtggggtccctataagagaggcgaagatgaggattattgaaaatatttccaaaaagagaataccttgccccatgatagggcccaaagtcccatatttggcttcaccgtttctacgagccatgagaatttgtgctccggtgctaaatccgaaagtgaccatatagaaagcaagatacaatactccggctaaggcggaggctcctaattctacttgtccgacacgccccataaaagccgtatcggtgatgttgatgaggttttgtacaaaaaggcttactaatatggggagagagattctccaaatttctttacgactatacatgtaggaggtgaagatgattatatattaaaaaagcccacctgacgaatcaggtaggcattcgcaagcgatattctttattatatgagtttattggtcgctgtatctgggaagataacagccggcgtaaaactttttgcctcttcgggagtcattagagcataggccataatgatgacgatgtctcccggttgcacttttcgggcggcggctccattaagacatattactcctgaacctcgttcgccttttatgacataagtctcgaatcgttctccattgttgttgtttacgatggagactttttcattggcaataatgttcgccgcatccattaaatcttcgtcgatcgtgatacttccgatataattcagatttgcttgggtgacggtgactctgtgaatttttgattttacgacctctataaacatggtttcataagttattgttcggggcgtcgatatgcgatgttgtcgattaatctcacctctccgttatatacggtaatacaacctactatataatcgctgtcgttccagcctgcgataggctgtaacgtgtttccatcgactatttcgtagtattctactctcatttccggtattgcatcgatggtagagattacttcatcgatagtctctttcaccgaatggctggctgcaaaggtacgacttttaaataatgtctctgctattttgggtgcatttcttctttgggactttgtcaatcgagtattacggctgcttagggctaatccgtctgattcgcgtacgatagggacagctatgatgttgaatgtatagcccatttgagcggccatagctcgtataacggcaatttgctgaaaatctttttctccgaagtaggcattatcgggattgactatatcgaagagtttactgacgatttgagccactccgttgaaatgtcccggtcggtatttaccttccatgacttccgctacttttcccaagtgaaatatccgggtatcttcggtcggatagatttcttctaccgaaggagcgaaagcataatcacaatttactgattcgagtaattgacagtccttgttgagcgtgcgggggtaaagtaacaaatcatttttgtcgttgaattgggtggggttgacgaatatgctgactactgtcacgtcattattagccacgctggtctttaccagttgcagatgtccgttgtgtaaagcgcccattgttgggacgagacctatctttttcccagcatttctgtccgaatcgagttgcttacataattcggctattgttgtgaatactttcataattgaacattggttgaaaaaattgtgcaaaagaaacaaataaaacccaaacgacgaagataaagctgtatttttttatggagagtaaccttaaatgtttctttttgaaagggaaatatagggcgtctgacgattttttggtgttaatacttctaatatttggagggttacgctattttttttattatctttgcagaaagatgcaaaagtgggctgtatcttggcatgaccggttaaattcgtttcaagccacgggtatgctatttttgcaaaataaattgagtttaagaggagcagaatgaaagaagccaaagtcctatttattgcacaggagattaccccttatctgccagaatcggaaatcgctaatatttgtcgaaatttaccgcaaggtattcaggatagagggcatgagatacgtacctttatgcctaagtacggttctattaacgagcgtcgtaatcaattgcacgaggtgattcggttgtcgggaatgaatttaataatcgatgatacagatcatcctcttattattaaagtcgcttcgatacaatcggctcgtatgcaggtctattttatagacaacgatgattattttcaacgtaatgccgacggggtagtcgacgaggatatgcgtcccgataatgacgaacgaagtattttctttgtcagaggggttatggagaccgtgaaaaagttgcgttggactcctgatattattcactgtcacggttggataacggcgttgactcctttgtatattaagaaaagttatgccgaagatccttcttttcgggatgcgaaggtgatatattcgttatacgataatggtttcaagactccattcgaccccaattttgctgcaaaattgaagttggaggggatacaagacaccgatataccttttgcggtaggagagtctatcgatcctgttgttcttaataaattggctatacagtattccgacggtgtgattcaagccagtcgagatataaattcggaaattacggattatgtacaaaaaacgggcattcctttcttggggtatcaagaccctgaaaattatatagatacctataatgatttttataataaaattgtaggtaacgaataacgtcagttactaaatagaaaatgaaaatatttagatttttaccgatagcttttgcgatagttttaggtttatcttcttgtggagacgaaaatagcgcaatcggttcttcgatagtcgatacgaatattgaaattgtggtggactcttcttttcaagagttgataacggttgagtctgttccgaatgatagtgtcgttggaagaactataacacaattaatcgggcgtatttctattccgggatatggtaggttagaaaccgattttcttacccagtttatgccggctgcaaactttgatacggttggtgtgaataaactcgattctttgattttatatttaagttacaatacagaatcctttacaggagattctttggcccctatgcagttgagtgtatatccgttggataaacggttggagtcgcctgtatatagcggtatcgatccggcggaatattataatgcacaagctgccccggttgctttgacaagttataatgcttcgtttttaggattaccggattctcttatagaactcggctataagatgattcgggtgaaattacccgatgaaatggctgaccgtttttatcagaaatataaagaagatccaactgtattttcgtctcctagtaggtttacacaatattttccgggtttttatgtaaagacatcttatggaagcgggtgtgttgtgaatgttcaaaatacggtaatgaatttacattacaccaaaacaaccgtgattaatgataaggattctacatataactcgactcaaactctaatggcggtaactcccgaaataacaacgggaaaccatataaaattggaaatagatgcagagataaaaaacgaaatatcttcggggaaggtctatttacaggccccggcagggttaaatgttttgattcactttccaacgcgtaaaattattgagacttttgaagatgcagtagggggaagtggtagtgcttcgactgtacaaggacttgtgaactcgttgactttacgtattcccgtaaagacggtttctagtaattataatcttgatcctccgcaatttttgctgtttattcgtaaatctgagttgcaagagtttttcgaaaagaaaaaactacctgacaatgtgaatacattttatgctaagtatgatagtgatgcccatgtttataattttacgggattgaggacctttatcaataatattatagaaaagaaacggacgggtactgaaatcacagatgccgatgaggaaatcgttcttgtaccggtgtctgtgtatagcgaaacggtatcttccggtggaagttattactattattcttacaatgagaaggaggtagttaccgatgttgttccctatatttctgctccatcattggcgttggtcgatgtagataacattaagttgcgattaacatatagtaaacaggatatgaaataattctctttatatttgaatacaggagggagagataaaatttatctctccctcttgtgtattgttgtgtttagtattttcatacatagaaatctcgttagtgattttcaaggaaaacaggagaatgaatttctttttttttgtttggtaagaaaaaaatagagaaaaagagttgcggtgtttctttaaatatattacctttgcaccgcaattgccacaatagctcagttggtagagcatttcattcgtaacgaaaaggtcccgggttcgagtcccggtcgtggctcaggaaaagagattcaacttacttttcaaatagttgaatctcttttctttttatataaaagtttggaaatcatcatatatagcttttacgattgaggtataatcgagtctttgattggctttgaaagttctgttggttattcatgggtatcggttttgagagaacgaaaatagtaaaagcctgtgtttagggtagataaggtagaggtgaattttttttgtaattttcttaggaaagatgttgcgtagaaataaaaaaagatctatctttgccgtcgcaaaacaaaactggtgcggtagttcagctggttagaatacatgcctgtcacgcatggggtcgcgggttcgagtcccgtccgcaccgcagtaaagagataaaattctttataaccaattaaaatggtgcttgtagctcagttggttagagcatcggattgtggttccgagggtcgtgggttcgagccccatctagcaccccaaaagaaaaggcgagagtaaataactctcgccttttcttttagagggaagtctctcaaatgagatattacgtttctctcctgtgttgcgttagcgaaattttcggctgagtcctaaaaatatcaatgattatacttttgtgaatgagggttggactgggtaaggagaaataaaaaattctatttcccattttgtttgggctaaacctgtgtttatatttgtggaatataggaggtgtttttgcaaaaaaacttaaacaagttcaggtttttgcagttgactttcactatatttgtaaaatataggatgcggttcggcagagtcaaattggaaatgtgatttccgtttgcctttgcgctcacctttcgctatatttgtcaaaactaatcaaagtatgggacaaaattttggatttgtaaaagtggcagcggcgattcctcgtgtggagatagccgattgtatatataatgagagagaaatatataatcagataatagaggctgttcatcgaaatgtacaaattattgttttcccggaactttctataacagcctacacttgtggcgatttattcggccatacgcttttattggaacaggctcgaaaggctttgtctctgttggtggaggagactagcgattatccgatattatgtatcgtgggaatgcctgtggctgctgggaattgtttatataattgtgccgtagtattccaatcgggtaaaatattgggagtcgttcccaaaagctatttgcccaattataaggaattttatgaggaacgttggtttacttctggtatttcggcaacgatcgatactattgaactatgtggtgatagagttccgttcggtacagatttattatttgagagtgcaggtgttgtcgtgggagtagaattgtgcgaagatttatgggtccctatacctcccagttcatatcttgtacagcaaggtgcagatattatagtaaatttgtcggctacgaatgagttgatagggaaacactcttatcttctttctcttgtccggcaacaatcggcgaggtgtgtggctggatatgtttatgcttcggccggattcggagagtcttctaccgatttggtatttgcagggaatggccttgttgtagagaatggtagtattcttgccgaatcgaagcgtttttcttcaacgcctcaacttgtagtaagtgaaatcgatgtggagcggttgcgtacggagagaagagtgatgacttcgtttgcaaagggtgcttgggcacatggcagagatgcacgtttcattccgtttgtcttgaccgatattccattgcggttgactcgtaaggtgggggctttcccttttgtgccttccgattcgttggtcttgaacgaacgttgtgccgaaatactcgatatacaaagttcggggttagccaagaggttagtacatacccaagctcaaagtgtggttctcggtatttcgggcggtttagattcgacattggctttgttggtcgcagtcagaacactcgataaactcggttggaatcgagagaagataataggtgtgactatgccgggattcgggacgacaggtcgtacttatcataatgctatgatgttaatgcgttcgttgggtataactattcgggaaatttctattcgggaggcttgtgagcttcattttaaagatattaaccacgatatttcaatccaagatattacttacgaaaattcccaagcgcgggaacgtacacaaattttgatggatatagcgaaccagaccggaggattggttataggaaccggggatttgtctgaattggcattaggttgggccacatataatggtgatcacatgtcgatgtatgctatctcaacaagtattcccaaaactttggttaagtatttggtgagctgggttgccgagaatgagctggtaggcgaggcgcgggatacgttgatcgatattgtcaatactcctattagtccagaattgatacctgccgatgaaaatggagagataaagcagaagaccgaggatttggtaggtccctatgctctgcatgattttttcttgtataatatgttgcgattcggtttctctcctgccaaattatatttccttgcccaatatgctttcgaaggggtgtatgagccggatacgataaaaaagtggctgaaaatattctgtcggagattttttaatcaacaattcaagaggtcgtgtcttcccgatggtccaaaggtgggaacggtaagtctttctcctcgcggggattggcggatgcctagtgatgcgtcgagtgccatgtggcagaaagagtgtgacgagttataatctgtttttcctgcttactggtcggtctgaggaattttttctttggataaagagctttttgtagaaattgtatcgttgggtaatattgtgttccgtggaatagaatcggattgtatatctttggttttaccgttgtttttgggattttttctaaataagtctccccaacggttaaaatcgtgacgtaacatgatccctacgccttgtgtcgtcaatgccgatttgatgtaataattgcggtcgttataatgattataggccttcaatcgtatcgttccgcttttattcagcaaatattccaaatcgaaatctccgatgaatgtattgttattgaccgtgttgtctctatatccgaagttcccgttgaaaatcaatcgattgttcagtagctggctggatagggcaagctccacctccatatcggaaaaatcacctttttcactacggaagtttggcgaaatattccagttttcgcttaattgtcccagaatgttacctaattgagaggataaggtcgaggaagcgacagagacaagttcgttatttctactttgccccatattcatgaagtccggagtgtagaacctattcaaggccaatagatagatgatctgacggttcatcatgtcgtttgtactgatgatactacgtacccgtctgtctacgtcttgggtcaaagtagggaatgctatgtcgaagtttaggtctggtcgacgtacgtctccggatacattcaaaatagtttgtacgggtactgtcgttcttgataattctttgtcattggcgaagttttcatcgagatcgagcagattggccgaaagggagtaaatagccgatatatctaagttagtagccataggatccccgtggaaagaaactcggcttccttctttaatagagaagtctcgtgtaatgatatcttgcaagctgaaattgtaactccctttttctaagacataggaaccatataattttatatcgccgtccattgaattatattccagtaatatactgccctgaccggtcgcttttatcatatctccggtagatttgtccatgattaggttcatttgggcttggttggttgcttctatttgcagatttaaatttaatgcactactgttttgtattttactgttctccatcatgcgggcattgttcttaatgacaatgctatcggcttggagctctcctatctttgtgttctgttttcctgaattggtgaaagtaataaagtcataatctccggcagcttccgatcctgataggacgaaggtgaatttcgactggtctccggtggacatatttacgtcgatttgggtttgtcccggacttccttttatcatagtagagcctgtcccgtaaatggttccataatatatggggctttgcctttctgtcatatcgtaggacaggaaatcttgggcttcggttatggcaatatcgtaacttacatctttgaaattatgatgttctatccaacccgaaccttttgccgtatgtttcaatttatcataaatcgtaacgttgtcaaaccaaatacgggtaggggataaatgaatactatcggatagattgtaccgagtgttcaaatattcaataccgaaatctaaattttcgacataagcatcaccggtaacatttagggccttgaatcttccgaaaaagtctatgtgtccgctggctattcccgatatgtcgctcataacggtagaaacaaatggtcgaaggaatgcaatattcaatttatcgggatcgaacgaaagagagagagagtcttttgtcggaaatatatatccgtcgatataagtttgtttatcttctttattttcgatgaaccctttcatgagaataccttgattgtcgttatcccacatgctgaatagatgtaagtccccgaagatcgcttcattgtaggagaaatcttttacatcgaattgttcagtacttaatcgaggtgcgcctgtcaatagatgtgtagctaacaaatttccagtagcgttacccccgaaagtgacattttttatattgagtgtaccgaaaatataatcgaggtctacgtcgttgagttgtattttcaattcgtcttcttctcggttggaggcgataccgtctataagtatatattggggagcatgtgatatttcaaaatcattgatttctatttgtttctcacaataggaaatatccgaagggctcatttgccaaatagtatcgttgaaaataagagtggaaggattgatgtgagtttgtatttgtaatttattcccttcgtgggttcgtgaaaaatgggtcgatgtattcaattctccataaaatgtcgattgggtgtcgttattccagttgagtacaaggtcgagactgtctcgataggccttgcttctaaggctccatgtcgttcgtatttgttttttattgtaggagttcgtttctatgaataaagccatttcggtggaatcttttcgtgctgaaatgaatgcatcttcgatatgactttttttataccagagatggggaatcgttccggttatgagggctgtgtttcggaggctattcatttcaccttcgataatagctctatctgtgaatgtaacaggtagttcgagcacttgtgccatgtgtatattaggctctacggtaaatctgaatttaaaattattcggttgttgattttttttgtgttctgtttttttaggttggttctcttggaatgggaatatagatggaagggattccgataacagtgtttgtaaagatttttgtagagtagagaatttgtaattaccttcaatccaaccgttaatatagtccgaagtaacagctatactttgtggagtgttttggttatgagcttctatattgaatttatttagtctgaatgtatcgtcgttgtttgtaaaagataaactatcgatagataagaggccttctgcgttgtccaaattgttccctgtaaatttggcgactacattgaatcctaacttggaatttttatacttgggcattagttttaaagccgatacattgaggtctcgtgcctgtaagacgaggtcgaattcggagtctttatcttttaagacagaaagaccattgactcggagttttccattcggatcgttaatttcgattataccattatatcgattgtccccgaactcaccgttaagcatgatgttttcgtaaggatatcctttgtattcaaaatagctgattcccccgaccactttgccggttggggcctgatatttggcttttttactgtcgagttcgactttgaaaataatttcgccataaggatttccttcggtgaatagtccatttagattaaattttttcgattctatcaatccgctgtatcgagtcgtattcagactattgttttggttgatggatatatcggaatgaacagagccgagatctgtttctaatgttccgcaggctgtcagattttggttttggttcgagatattaccggtgaaatgaattgtacctaaccgggaaatagttttacattgttcttcggttagaaaaggtaatttggaagaaatatcggccaatcccgaagatgaagcgtttaatgtgatagggtcgcagagtatatctcgtttttgtggatttgttatgtttttcacggatatttgactgtgagcgatgatatcttctttcccgaaattaaaatcaaaggtatggaaatatagattgtttggagttcctgtcagatgcatcgaaatgagtatcggagtatttattttttccaataccgggataaaggcagctatatcgctgggattaattagggatttcgttatctgtaaagagaatcgtgtttggtcgtagaagtgttcggccgagagtgtatcgggcagcgtggcgataattggtttgatttcgatacggctatggggtaattgtattttaaagtcagataaccttgcttgttgtcggttggcttcgaatttaaattgtagacgatttaaagaaaaacccgattgctcgtcgaatcccaatcgcttgatggagatatttaccgagtcttccgatagtgctttgatagatagttttgacaataagtttctcaaatcgatatggttcgggtcgaattgtccgcgtcgtatgggtgcggataatatgtcgtatttgatttttccacggcgtatgatcgcattgtttattttgaaatttattttctttttcggtgtattcttatcgcttttgaaagcgtcgataataaattgcaggtttgtttcagagcttggagtctcttttgttatgcgggcatccagaccgaatagttgtatattcgtgaaaaccaattctcgatcgacgagtaaatctgaaagggagataccggccgatattttattggcatataatagagtgtctccatttaagtcgggtatatatgcaccgaacagttctaacttgttgaatggtgatatttgtattcggtcgatagttatgtttgtatctaaaatggcagatagttcttttatgccgatgtgcctgactttatcctgtatgttggggatagataacaagatatagccaagtgtatatatcgctatgatagagaatataacgatatgcacaaatatccgaaatgcagaatagaatttcctcatctttataagtatgcaaaagtagtgtttccttttgaaagtagcgataggatgcttggcttttcttttttattaatgtatgaaataattataaaagtcaaatggttttaccgatgaaatatgtacttttgcagaccttgatttgatgaaggattgaaaggagtaaatgtatatgagcataactattttaggtatagaatcttcgtgtgacgatacttctgccgcagttattcgcgatgaggtcatgctgtcgaatgtgattgctagtcaagcggttcacgaggcttatggaggggttgttcctgaattggcatctcgggcgcaccaacagaatattattccggttgtgtcggaggctttaaaacgtgcgggggtgactccggaggatttgagtgcggtggcgttcaccagaggccccggacttatggggtctttgctcgtcggaacttcttttgccaaaggttttacgacagcattgaatattcctctcgtcgatgtcaatcatttgcaagctcatgttatggctcattttatcaaacggtttcccgatgataacactcagcctcccttcccgtttttgtgtttactcgtttcgggggggaattcgcaaatcataaaagtagaatcttataatgaaatgactgttatcggacaaacgatagacgatgctgccggtgaagcttttgacaaatgtgccaaagtaatgggattgccttatccgggaggcccggttgtagatagattggcgaaggaagggaatcccaaagcgtttgcactaagtaaacctcacatacccggttttgattatagtttcagtggactgaaaacttcctttttatatttattgagagacaaaataaaagaagaccccgatttcatcgaaaaaaacaagtgtgacttgtgtgcatcgttgcagactacgattgtggacattttgatggacaaactttataaggccgttaaacaaaccggaataaagcatgtggctgttgccgggggcgtttcggcgaactctgctgtgagggctgcttttgaagattatgcccgaaagtatggttggacagtttatctgccgcccttctcttttacgaccgataatgcggctatggtggctattacgggttattataaatatttggataaagagttttgtgatatagcgaaggctccttttgcccgggttgaattataaatacgaatgaaatgaatgtcgagattattgttatcggcgatgagttgttgatcggacaggtgaccgatacgaattctgggtggattgctcgggagctgaatcatatagggtgggaggttaccgagataacgacagttagagataggtctcgggaaataaccgatgctctgaatagctcgttcggtagggtcgatgtcgttttgatgaccggcggattgggcccgacgaaggacgatattacaaagcagactctttgcgattatttcggtggaaagttggtctttgatgaatcggtatttgccaatgtggaagccatttttcgtcgtcgtaaattgacgatgaatgatagtacgcgcaatcaagcctatgttcctaatgtgtgtacagttattcaaaatcccgtgggtacggctcctgtcatgtggtttgaaagaaatggtaaggtattggtgtctatgccgggtgtcccgacagaaatgaagaccgtcatgaaagaggtggttataagtcgtttgagggagtattttcgagatcattcgtctatcttgcatcgcacttgtttagtgaaggattttacggaatcgaggttgtccgaaactttatccgactttgaagcgcaattgccggggtgtatcaaacttgcctatttgcctacgccgggagtaattcggttgagactgactgctcgtggcgatgaagagtcatatttgcagaagattatcgatgatgagttttttaaattgaggactatattgggtagccatctgttttgtggttcggatacaactctcgcaggagcattagggtcgatattaaccgaaagaggagaaacgttggcgacagccgaaagttgcacgggaggaaatatagctcatgaaataacaaggatagtgggtagttcggtctattttaaaggtagtgtcgtggcgtattctaacgaggtgaaaatacgtgttttgaatgtgtcgtcggagacattatcgggttttggcgctgtgagtagggagaccgtcttgcaaatggtatcgggggtacaaagattgttgtcttccgattgtgcgatagcgacttctggaatagcaggtccgggtggaggcagcgttgagaaaccggtaggtacggtgtggattgcagttcggtatggcgagcgaagcgaggctgaatgtttttgtttcgaaggcgatagagagcaagtaattgcacgtgcgacccaatcggctttgttgatgttgatacaactgatgacaaaatagaactgaataaaaaagttccgattttaataccttaaaaatttggaacatatttctaaaatgctttactttgcactctgtttgcgaaagcagtaagaaaaaacaaacaaaataatagatagcgatgtcaaagatttgtcaaattacagggaaaaaagcaatggttggcaacaacgtttcgcactcaaaaagaagaacgaaaagaagatttaatgtcaacctctttacaaagaaattttattgggtagaacaagattgttggatcacgcttacactttcagctgccggtcttcgtacaatcaataaaatgggattagatgcagctatcaagcaagctgccggaaatgggtatttaacagaaataaaaatgttatattaagatatggcaaagaaagcaaaaggtaatagggttcaagtaattcttgaatgcacggaacacaaggcgagtggtatgcccggaacatcgcgttatattactactaagaacagaaaaaataccacagaaagattggagttgaaaaaatacaatcccatcttgaaaagagttactgtacataaagaaataaaataaggaaggattgaaccatggcaaagaaaacagttgcatcgttgcaaaaaggcgaaggccgtacttattctaaagtgataaaaatggtaaaatcgccgaaaacaggggcttatactttccaagaggaaatggttccgaatgacgcggttaaagatgtacttagtaagtaagtcataattagcgtaatataaagaaactttcttatacgaaatgtgtaaggaagtttttttttaccatgataattttatagctttgcatatccaccgggtagctgcttacagttacttttcttaaaaattttatatatgggattgtttgatttcttttcgaaagagaaaaaggaaaccttggataagggattatctaagaccaaagagggcgtattttccaagttagcgcgtattgttgccgggaagtcacaagtcgatgagaatatattggacgatttggaagaagtattgatcacgtctgatgtcggagtggaaactacacttcgtattatagaccgaatagagaagcgggtagctcgtgacaaatacataaatacgaacgaattaaactcaattctccgggaagaaatcacagcgttgctaaccgaaaacgatgttgaggatgccggtgaattttctgtccccgaagggaaaaaaccgtatgtaatcatggttgtcggggtgaatggtgtaggtaagactacaactatcggtaagttggcatatcaatataaaaagagagggaatagtgtttatttgggagctgccgatacgtttcgtgccgctgcggtcgagcagttgatgatatggggcgaacgggttggagtccctgtcgtgaaacaaaaaatgggagccgatccggcatccgtggcgttcgatacgttgagttcggcgaaggcgaataatgccgatgtggtaattatcgatacggcaggtcgtttgcataataaattgaatttgatgaacgagttgaccaaaataaagaaagtaatggagaaaatcgttcccggtgctcctcatgaaatcttgttagtattggacggctccacaggacagaatgcttttgagcaagccaagcagtttactgccgcgaccgaggtgaacgagttggccataacgaaactcgatggtacggccaaaggtggtgtggtcataggtatatccgatcactttaagataccggttaagtacatagggctgggtgaaggcatggaagatttgcaggtgttccgccgtaaggagtttgtggactcgttgttcggagattgatattcgtgagtttttaggatagacggctgggtggtcttgcaaaggcttcatagccgtatttttgtgtaatgacaatgataaaaaatagcgttgatattattacgttgggttgttcgaaaaatttggtggattccgaacgattgatgcatcgtttcgcagaagccggttataaggtgagacatgatcctgaaaaagtttcgagtgagtttgtcgtagtgaatacttgtggcttcattggagatgccaaagaagaatctatcgaaatgattttacaaatggtcgaggctaaaaaagctcataagatacatcatctttatgtgatgggctgtttgtctcaacgttatcgggaagaactggaagccgagatacccgaggtagataagttttatggaaaattcgactggactgatttgttgacggatttgggatcgcgaatttccgaggagaaagatttcgggcgcatactgacaactccgcctcattatgcctatgtgaaaattgccgaaggttgtaatcgattttgttcttattgtgctattcctttaattacagggcgcttcgtttcttatcctatggaacagttgctcgacgaggtgaagagcttggtttcgcagggcgtgaaagagtttcagattattgctcaggatttatcttcctatggacttgatttgtacgggaaattgaaattaccggagttaatcgatcgtatggcgcagattccgggtgtgaagtggatacggttacactatgcttatccgtcacaattcccttatgagatattacctgttatacagcgtcatgataatgtttgcaaatatctcgatatcgcattgcagcatatcagcgaccatgtgttggtagatatgcgtcggcatgtgacgaagcaggagacttatgatttgttgaaacgcatacgaacggaagtccccggcatacatattcgcacgacattgatggtgggatatcctggtgagaccgatgaggatttcgaggaattaaaagcgtttgttcgggaggctcgtttcgagcgtatgggggcgtttgcctattccgaagaagagggtacttatgcggccaatcattttcccgactctatcccggataaagtgaaacaggcccgactcgacgagttgatggcattacaagaagaaatagcacttgaaagcaatgcttcaaaggtaggtcaaatatttgatgtgatagtcgatcgggaagaggaggactattatgtggggcgtacggagtacgattctcccgaggtcgatcccgaagtgcttattgcaaaagatcgctttctgactgttggagatttttgtcgggtaaaagtcgtcgaagctctgccttttgagcttatggctgttcccgtggagttggattgataagtcggtgagatatggcgaaagaggttgattctatacatttgttatcttgtgctattgaggcgagtttggggaatgatttcccggctttcgcttttcgtctgccgggcgaagatggcttttattggggggcctgtgagcctgatagacttatgactcttgccgatggcgttttccctgaaagacaggagggcttctttttcgcaccttttgaagaaggcgagttgcctcgttactttttccctgtgaaaatacaacgggccgaagagataagtttggaggcgttgaattacgaggcgggacaaactttggcaaatttggagataaaaccggtagatagttcttttgaacagtatgaaaaacaagtaaatacgcttgttgcagcaatgtctcgtaaagagataaaaaaggctgttctttcccgcaccgtcacattgaaccgtccggtagtttccgatgggcagctgttttttcgactggctgcaaaatacgattcggcttttgtttcgtgggtcaatgtgcccggtgtaggacaatggataggagctacgcccgaaacattgctcgattgtgacggagtgtcattgactacgatggctctcgcaggtacgcgaaaggcgggagcgaaggagccgtggggacaaaaagaacaagaggagcaacaaattgtgaccgattatatatcgaaggtatttagagataaaggtctcgaaccaattatcggtgagcggttttctcgcaaggcaggacaggtggaacatctgtgtacgcctatttctctgaaagtcggttcggcaaacgggagattggccgagatattgtcggcgcttcaccctacgccggctgtgggtgggtatcccaaagaacttgcgatggaatggattcgtcgggtagaatcgcatgagcgcagatattatggcggttatttgggccctatgttcggtgagcatgttcgtttgttcgtcaatcttcggtgcatggaagtagacgattcccgattgagattgtatgtcggcggaggtttgaccgataaatcggacccggaaagtgagtggaaagaaaccgaggcgaaagcgcagactttgctgtcgattattaatggttataagtagagtgaatatgaaaacgaccgataaacagggctgtaatattcttgtcgcacttttggcggaacatggtgtaaagcgtgtcgttctatcgcccggatcgagaaatgctcctttattaatggcattttcgcgtacacccgatatacaggactatgtcgttgtcgatgaacgtacagcggcttttatggcattgggtatgtcgcaacgtagcggtgaacctgtggcattggtttgtacatcgggaacagcgttactcaattatgcgccggctgttgccgaggcctattaccaacatattccgttgatagttatctcggcggatcgtcctatggagtggatcgatcaggacgatagtcaaacattgcggcagtacggcgctttgtctcactttgtgaaacgttcgtataatttacgggcggaactgtctctgccgatggacgggtggtacttcaatcgttgtataaacgacgctttgttaacgtcattgtcgggagaaaagggccctgttcatattaatattgctgtttccgagccgctcacgcaagaaatggatatgccttccgtacgggagcgttttgttactcgcataccttcgtcgaatattcccgatgagcaatctatgaaacttttgtgcgatgagtttatgtcggctcgaaaggtgttgattttagtggctttctcacagcccgatgagcagttgaatcaagttcttttacgtttagcggaattgccgcaggttgtcgttcttaccgaaagcatagccaatgtgagggggaagaatttgatacctacgatcgatagggtttattcggtaatcgataaagcggaatgggaagattatgcacccgatttgctcattacattaggcggatcattggtgtcgcgtatgataaaggcttttttacggcagcataagcccaagttgcattggcgtatatcacaaggcaatcatgtagtagatacgatgcaatcgttgacttgccatatcgattctcaggctgcatcgtttttagaggtgttgtctcgaagtgtattcccgatagagagcgactactcgatgctgtggcataggaaagaggtgattgctactcgtttgcacgacgattatatcgctcatgtcgggtggtgtgatttgaaagcattttcattgatattacctgcgattccgccgggaacagcattgcagttttccaacggtactacggtacgctatgcccagttgttcaagtgcgaacaggtgttgcggagcgattgtaatcggggcgtgagcggtatagacggatccacctcgaccgctgcgggtgcggcttgtgtgggtgaggagatgacggtgttgattacgggagacatgagtttttcgtatgatgtaaatgggttatcatcgacttatctttctccccggtttaaaattatcgtaatgtgtaatgggggtgggggaatctttcgatttattaaaccgacttccgatttgcctgaactggaaacttgttttgaaatacatagagatatttcggtcgagaaatatgccgatttgttcggacttcgttatttcgagctcaatgatgaaaaatcggccgcagaggtactttctctctttttcgccgagaaagatcggccggctatactggcggtccacaccccgaatgtttataatgccgaggttttgcggggatactttcgccggtcgagataatgatgataatgattgaaataaaaaatataagaatatggaaccgatagattggaaaacgattaaggagtatgaggatatacttttcgattattgcgatggaatcgcgaagataacgattaaccgcccgcaagtatataatgcgtttcgtccgcaaacgaattgtgagatgctcgatgccatgtctatttgtcgggaacgttccgatattggcgttatcattctgacgggagcgggagacaaagcgttttgttccggtggagaccagaaagtgaaaggaattggcggttatatcgatgaaaacggtgtcccgaggttaaatgttttggatttgcataaagctatacgttccattcccaagccggttatcgctatggtcaacggttatgcgatcggaggcggacatgtgttgcatgtggtgtgtgatttgacaatcgcttcggagaacgctcgcttcggacagactggcccgaaagtgggaagtttcgatggaggattcggctcgtcctatttagctcgtatcgtagggcagaagaaagcgcgcgaaatatggttcctatgtcgccaatattcagcgaaagaggcagaagaaatggggctggtcaataaagttgttcctttcgaccgattggaggaagagacaatcgaatggtgtcgaacgatattgaaacgtagcccgatggctatacgaatgattaagcgggcgttgaatgccgaacttgacgggcagcggggtttgatggaatttgccggtgatgccactctcatgtattatctcatggaggaggcgcaggagggcaagaatgctttccttgaaaagagagaccccgatttccagaaatttcccaaattccccggatagatgttaaaggcaagttatactccttatatacttcatttcaaagtccctagcggaacttctcggggcgttctcacgcaaaaggagacctatttcttgaaagtgtgggacgagcataatcccgattgtttcgggataggagaatgcgcactgtttaagggattgggagcagacgatcgtcctgattatgaagctatgttgcaaacggtttgtcggggtatcgaccgaatagatgaaatagatttgtctacatggagttctatccattttggagtggagaccgccttactcgatttgcagcatggcggacgacgcatgatttacccgtctgagtttactgccgggaaacaagcgattgaaataaacggattgatatggatgggcgataagcgcactatggcttcccgtatcgatgagaaattagtggccgggttctcttgtattaagttgaaaattggagcgatagatttcgatgatgaatgtgaattgctggctgcaattcggcgacgatatcgccgggaggatatagagttgagggtcgatgccaacggtgcgttctctccttatgatgcattggaacatttgcaacgtctttcggcttatgatttacattcgatagaacagcccatacgagccggacaatgggaggcgatggctcggttgtgcgaagaaactcctctaccgatagctcttgacgaagaattaatcgggataaccgattccaccgagaaattagcgttattggagacgatttctccgcaatatatcgttttgaagccttctttgatagggggattttcgggtgcggaagagtggatcgaatttgctcggaattgtcgtgtgggttggtggataacatcggcattggaatcgaatgtgggattgaatgcaattgcgcaatggacggcgacattgcctataaatatgcctcagggattgggaacgggagctttgtacaccaataatataccgtcaccgttggagcagataggagatgagttgagatataatcctgataaaacttggattttttcgatggattcatggaaataaggctaaatcatcgtatttgtcgtagtcgagaagagatactcaatgcttctacacccgaagtggctgcttttctcgatgagtggttcgcaccttccgattttgtttggggacatacttcgggatcgaccggaactccaaagccggtaagattactgaaacgagatatggaggcttcggcacggttgaccaatgactttttcgatattacctgtcgttcggtaatgttgttatgcctgtctcccgattatattgccggtaaaatgatgattgtaagagccttgttatccggtgctgatttgttggtcgtaactccttcgtcgttgcctttgacgacaatagacgagcctatcgattttgccgcgatggttccggcgcaagtagtcgaatctttgaaaagtacgatgcagaaatcaagactttctcgtataacgtctctgataataggtggtgcacctttatctcccggtactgaggtggagctggaaaaacttcctgtcgatatgtatgctacttatggtatgaccgagacagtttcgcatgtcgcattacgccgtatcggtgactctttgtcgttatattgtgcgttgggtggtatatctttttcgatagatgaacgaaattgtttaatcattcacgctccgcacttctctgtaaaagagtttgtaacgaacgatgtggttgagttggtagattctcggaattttcgatggataggacggtatgaccatgtgatcaatacgggagggataaaggtttttccagagttgatcgaaaagaaaatagcaggtctgtttacacgccgtttttttgtagcgtcttgtgacgacctgaaatggggtgaatcggttgctctcgttatagaaggcgaggctttgtctctggaacaagaaaaaatattgctggaaaagattcgggcaaaagtaaataaatatgagttcccacgtaaagtattgtatgtgcagaagtttaaggagacgtcttcgggaaaagttatacggaatatttagtcctttttcttcgttgagaaagaattagaactataaaatttatgattttattttgatagtaataaaaatgtatttgtattaacttgtcttgccgaatactcaaattatatttacctttattgcaaatttaatatatctctaacattttaatattttaccatgaaattttttcaaaatttagtatgggtagcctttttttcgttatcgggtacagtggccgctcaaacacctgtttatcttgatgaaaccaagccgatggaagaccgaatagaggatgctctgtcgagaatgacactcgaagaaaaagtggcattgtgccacgcacaatccaaattcagttcaccgggagtgcctcgtttgggattgcccgaaaattggatgaccgacggtcctcatggaatccgggccgaagtcatttgggacgaatgggaccaagcagggtggacgaacgattcttgtatggcattcccggcattgacttgtttggcagcgacttggaatcctgagatggctctgttgtatggcaaatcgataggcgaggaagcgcgatatagaaataagaatgtattattgggaccgggtgtcaatatctaccgtactccgttgaatggtcgtaattttgaatatatgggagaggatccctatttagcttcggagatggtggttccttatatcgaaggggtacagtctaacggggtagcagcctgtgtgaagcattatgcgttgaataatcaggaatacgatcggcatgctgtcaatgtcgaggttagtgaccgggctttatatgaaatttatcttccagcgtttaaggctgctgtacaaaaaggaaaggcttgggctattatgggagcctacaatcgttataagaatcaatattgttgtcacaaccaatatttgttgaacgatattctccgaaaagaatggggatttgatggtgtcgtagtatcggattggggtggagtattcaatacgatggaggctgcttataatggtttggatatggagttcgggacttggacagatggtttgacgaatggtaaaggagatgcgtatagcaattactatttggcacaaccgtttcttgatttgttgaaaaacgggacgattccggaatctgttgtcgatggcaaagttcgaaatatattgcgtctgatgtttcgtactacgatgaatcgtaacagaccttacggctctttcaaaaccccggctcatgcttctgctgctcgtaaaatcgccgaggaaggcattgtgttgttacagaataaaaacaatgtattacccattcgtttgtccgaaaccaaacgcattttggttgtcggagagaatgcgataaagatgatgacggtgggtggcggaagctcttcgttgaaagcacgatatgagatatccccattggacggattgaaggcaagagtcggagaggctactgaggtaatatatgctcgtggatatgtcggtaacatcgatggatcttataatggggtggtttctaaagtcaatcttgctgaatctcggtctgccgatgaactgctcaatgaagctgtaaataaagcgaagtcggccgattatgtcgtttttgtcggcggtttgaataagaatagccaccaagattgtgaaggtggagatcgcacatcgtatgggcttccttatggtcaagaccgagttatcgaggctttgtctcaggccaatccccgcacgatagtcgtattgatttcgggaaacagtgtggcgatgccgtggatagatcaggtccctgccatcgtcgaaggttggtattgtggtagtgaagccggtaacgcattggcttctatattggtgggcgatgtcaatccttccgggaaactcccgttcagtatgtatgccaaattggaagattatcatgctcattcattcaatgattcgattgtttatccggggttgaatcaccaacaaatttataaagacgatatttttgtaggctatcgttggagcgatcttcacaagaaaatacgaccgatgttcagtttcggtcacggattgagctacacgacatttgaatatggtaaagccgagatcgataagaaagtcgtgcaacaaggtgaaagcctccgggttcgtatccctgtaaccaatacaggcaatagatctggggcagaaatcgttcagttgtatgtgagtgatttgaaatcgagtttgccccgtccgaagaaagaattgaaaggatttaagaaagttgatttgcaaccgggagaaagtcaaatcgtagagtttgagatagacgagtcgaaactctcttatttcgatgataagaaacatgcctgggttgcggaacccgggaagttcgaaatattgataggagcctcttcgagtgatataagatcgaaggtcgcgtttgagttggaataattaatctgtgtaaaacaaagcactctcgacaaatttgtcgagagtgctttgttttacttattatagcccaagtgggatattatccgaatttgctaatttttcgtaaccgttcttcatctataatttgtatacgtcggccatcgactgttatgattttttcgtttgtaaaactcgatagggtgcgtatggcgttagatgtggtcatgttcgataagttagctaaatcttcacgagccatatagatgttgagtgtaagtccatcttcttcgacaccgtaattttctttaagtaccaataaggattcggctaatcgtcctcgaatatgtttttgtgtgagattgactgtgcgggcatccgaaatgcctaaatcgttggatagttctttaatgaaaaaccaagccaagccgttatttttgcgaatatgttcttctactaacggcatgggcaagaatcccacaatagaattttcaatggctgctgctgccgttacataaggttcgcgagagaaatatgcccgatagccgaaatattgaaccggtcgaattaatcgaataatttggctcctgcccccaactccgtctttgtaaatttttactttaccttttaataagcacattagttgtgcgggatcttctccctcactgtaaataatttcattctttttgaaattctgaattttaaagttttcggcgataatgcgtttttcttcattttcaagtagagcccaaaaatcagacatttcttgttgtagtatggattctaatgtgctttttttaaccatttgccttataactatgttttacagcacaaaaatatataaaaaattgatacattgttccttaaaagaggaaaaactataatatttaatagtaaatcgggatttatatcaataaaaaataaggagcgaaaaaatcatttacgctccttatttgtataaagcaaaagtgtccttatagactgttatttataagatagcgttcggcatccattgccgctttacaacccgatgccgccgcagtgatagcctgtctataccggggatctgcgacatctccggcagcgaatacaccttctatgttagtttcggttgtgtgaggtgcagtaactatatatccgttttcatcgagggtaatggaatgtttgaatatatctgtattaggtttgtgtccaatggcaaggaaaaatccatctatgggtaaatcgtaacgctcttcatgcgctgtgtctttgcctttaaccaaatgtactccttccactccgttttctccgaacaatccttcggcctgagtttcaaataagatttctatattaggattttcattgacacggcgttgcatgatattggaggctcttagaaagttttttctgacgattaagtaaaccttagaggctaagtgggaaaggtattctgcttcttcgcaagccgtatcgcctccacctactaccgcgactattttttttcggtagaaaaatccatcgcaagtagcgcaggccgacactcccatacctgcatatttaacctcatctgggagtcctaaatatttggccgaagcaccagtagaaatgattaaggcatcggcttctataattttttcaccgtctatggttatacgatatggcttttgagaaaaatcgacagctgtggcaatccctcggcgaatgtttgccccgaatcgttcggcttgttttttcaaatcttccatcatatcgaatcctgatataccttcgggatatcccgggaaattttctacatcgctggtcgttgttagttgtccgcccggttgcatgccttcatatagaaccggtgataggtttgctcgtgaagcataaatagctgccgtataaccggccggtcctgagcctataattagacaacgtatgcgttcgttttgttccataatttctatttatttgtgttattagcgtaaatcgataagttctgcttttgaatattgctttttgttaaaaacaaatgtcgagtctggaaagttttggtcggtagcatattttgataggttgattatgctatatgtccgatcgctataatagagcttaaaagagcttggattccatgtagttgtgttgataataattataatgtggtctatatttgttcctttcttctttggtgtaagttctgctatactttctttggaactttttgactttaatgttttgatgtagaagtcttttttgtagttattgatgagtatgtagggattgactgttgcgatttcttcggtcgttggttcggttaggtttacttcctctgttgcctttacgtatgtccattgttgcaaaccatcgtaccatacagtcatagatgttgtattccagtaaaatttgttcccagatagttttatagttccgttttgtttttctacgggttcgttcagtgcattaaaaacggtcagtgtaaaagtagccgatataccgttcgattgttggaatttaccaacgactttatctaatgcctgtgtaccgttttgtgcatgtagaggttccatgcttaatagtagaaaaagtacagagcagcatagtagaatgcgatttgttttcatttcattaattctaatttgttttcgagagccataatatccacaatcagtacttgtcgaggtttacccccttcgcttgggcctacgataccggcagcttccagttgatccatcagtcgtcccgctctattgtatccgatggagtagcgtctttgtaaagacgatgtggaggcctgccctgaaacgacgatcattttagcggcttcctcgaatagggggtctcggttgattacatcgtttccattgctccctgcgtcactgtcgggatttttatattctggaagttcatatggttcggggtatccttgttgtttgctgatatactcacaaattcgttttacttcgggagtatcgataaacgcacattgaatacgtttcaaatcacctccttcggtaaataacatatcacctcgtccgatgagctggtttgctccgggagcatcgagtatagtccgtgaatcgaccatttgcataactctgaaagcgatacgtgccgggaaatttgccttaatgttaccggtgataacggtcgttgaaggacgttgtgttgctatgatcatgtgaataccgacagctctcgctttttgtgctattcgagcgatgggcatttcgacgtctctgcctgccatcataattaaatcagcgaactcatcgataatcaccacgatatagggcatgaatttgtgtccgttattcggattcagttttctatggataaactcttcgttatactctttgattgttctcacatttgctttggcgagtagggcatatcgattatccatttcgatacagagagaatttaaagtggcgataaccttgtcgctgtcggtaattacggacttttctgcgtcgggtaatttagccataaaatgtctttctataaccgaatagatactgaattcgaccattttgggatcgactaatacgaattttaattgagccgggtgttttttataaagtaaagatgtgataatggcattcagcccgacggattttccttgtccggtagcaccagccaccaatatgtgaggcattttacaaagatctgctatgcagacttcgttcgtaatactttttcctaacgcaaggggaagttcatatttacattcttgaaattttttggaagctagaacagaatacatagagaccattttaggatctttgttcggtacttcgataccgacggttcctttgccgggaataggggctataatgcgaatccctaacgccgacaggctgagggcaatatcgttttccaaactttttatccgggctattcttactccgggtgctggttttatttcataaagagtaacggtaggacccacagtcgccgtaatggaactgatttctatattgtaatttttgagggtttcggtgatcagttttttgttggcagactgttcttccatgttgatctccacctcgctgttttcccgtttgtccagtaaatcgaatgtcggtcttttataatgcgagaggtctttcgtaggatcataatcttccataggagcttgtgtggctaatacttcggtctcagccgtctcgatgacaaagtcggggtcaccggtctcgatggtaactcgtttagtctcctcttcgataggaagaatattttcttgtatatcttcgagtgtagggatttcttcggtagggtcatcgggatattcgggcaatgtatttacaatatcgttttccgatgagggtatgttttcagtgttttggatttcgttagattcagtttccctattgtcattttcgttatctgtttctggattatccgtcctgttttttattgcttggatcgccttccctgtgaggttgacggacgatactcgtcgaatatattcgatggttttataacttagatggacgagcaatatgataacgagagctataatgaacagagccgttccccatggtcctatccatgcattgagccataaagtcgcataatacccgtgatatccccctaaatataggaaggtgttgttataactgtgcatgaaaatgaatccgaaaaagagagacaaaactattatcgacaaggcacagctaatcgtaaatcgtatcattcgagtatgggcgactttcatgaatcgacggcctacgacatataaccatagagaaacgatgaaagcagatatacccatccaacgatttatcatgaggttggataagtatgccccgaatgcacccgtccaattttgaatctcgtttccaatggaagaaagttctcctaccgatagattctcaactttactttggtcgatgcttcctgtaaaaaagaatgagatgaaagagatagtcaaatagagggagaatatgactaaaatgacacctaaaatgaaatttacacgttcatttttaaatatgtttttacgtatttctctttcattctgagctgtatcgtttccctcttcgggttgggcttgttttattttattttcttctaagtctgttgtaggcatattatgagaatacttcgctttggattttagattagatacaaatgtacaaaaaatacttattctcaacaatattatgagtttttccaaaagtaagatgtgaataaaatgaggactgtaaacagttcaagccggccgatgagcatgatgattgacaaagtccattttcctaaatcggggataaaagcatagttacctgccggaccggttgaaccggccccgggaccgatattgctgaggcaggaaagtgtcgaaccgaatgattcttccatagacaaccccaatgccgataggataatagaccctgctataagtaccatgacatatactaagataaatgctaatattttggatactatttcgtgagatatggctttcccatttacgcgtacaggtaatatagcattggggtgtatgactctgtaaagttcattttttgtatttttggcgaggaccaccagcctgtctatttttgctcctccacaagtggagccggcacaagctccgaagaacatgagtagtaaaaatatagttgtaaaaaatgggccccaagcgacatagtcatctccggtgtatccggttgacgtaacaattgttacaaccaagaatagcgatcttcgaaaagtatcttcgaaggatccgttttggtcggttatgtatagtcctgtaatgactaataaagtggcccctaatacaattgccgtgtaccatttggtttcttcattgtgtaatagttttttgaaatctccggttacggctctatacaccaaagcaaaatttatacctgcgataaatgtgaatatagtcatgacatattctgtgtaagaggagttccaaaaatttataccggcttgtttggtcgaaaatccacctgttgccatgacgcaaaatgcttgacagatagcatcgaaaagattcatgggacccaaccacaataggagacagaggataatggtgagtatgatatatacactccataatttttttgctgtttctccgatttttggtttcaatttttcagttgttataccggttacttcggaattaaataaaagtaatccaccctgatggttgagcatgggcagtatggcgattgttaacaagatgatacccattcctccgataaaatgcatgaaactgcgccaaaagagaataccatgtggaagaacgtctacgttttctataatggaagctcctgtcgttgttagaccggataccgtttcgaaaatagcatctgtaatactcaaatgattgggcattaagcaaaatgggagcatcccgaaagccgagaagaaaagccatatagaagttaccagtaaataactttcacgctttcctacgtcgttacgggaatttctaaaaatgtagaataatataccacctacgattgcagttattgatgccgatttaataaaggccggcgcatctccttctccataaataagagctacgacaaacggaacgagcatgaatatagattccatgcatagtaatattccgatgaatttcagtatgacatgaaagttaattttgggcatgatattcctaattgaaaagcttctctattttatgtaatgctgtgtcgagacagaaaataacgacgtgatcattcggttgtatccatgtgtttccggttacgaccatgccgtgtccattacgaaccaatccaccgattgttaaatcggacgggagttttaggtcttttactgcggctttggtaattttagaattttcttttgcgaccaattctacgacttcggcatcggataatgcgaggcatttagcatttgaggagtcttcgtcgagcaacaattggaagatacggctggctgctagtaattttttattgatgatatttcctatatttagccgttcggcagtagagatgaactggatattttcgacttctgcaatagtcttttttacccctaattctttggcggttaaacaggctaatatatttgtctcggaactatcggttaatgctatgaatgcatccatgtcacggattccttcttctttcaaaagatccacattgcgtccgtctccttgaataatgattatatcgttcatgtattcggctaatttataactcttttgcttgtcgcattcgatgagttttattgccatattatcaggcgcgtaactcgatatgcgtatagcgatacggctgcctcccatgatcattattttgtgaatttctgcttctgtttcacctgagagtttttgaatttcttgtatatgattaggagtcgtggtaaagtatgcgatgtctcctatttttatttcgtcgtttcctcttggaataatagtttcatgtatacgtttgatggccgcgatgtgaaattggctttcggctgttgtgagttcatagagttttttattcagaattttagcgttgtcgtgtaattttacacttagtacgattaattctccattacaaagttcaaaccagttgcgtgtccaagtgtgttttaatgcggttattacttcttctgcggccagtttttcgggatatatcagttcatttactcccagattttcaaagaaggctttattttcaggtaaaaggtattcgtagttgtctactcttgccagagttttttttgcgcctagtttcgatgccattgtacatgccatgatattacgagactcgaagggcatgacagcaataaataaatcggctttatatacttgggcttgttttaatgtttggaatgcagtagggttcccgatgacagtcattaaattataattggcatcgagttctcgtagtttctcttcatcattgtcgattagaataatatcctgttcttctcgggataacagttttgctaaatgtgttccaacctctccggctccagcaatgattattttcataattattagttctcttttatttctatgatttaccaattaccaataattaccgagtgaatattttcttcatctataccacatagttggtgtagttctttaactgtcccctgtgctatgaatttatcggggattcctattcgttttatatggggtgtatatccattgtcggacatgaattctaatacagcacttccgaagcctcctgttatgcatccatcttctacggttatgattcgtttgtatttttgggctacttcgtgaagaatttcttcgtcaatgggtttgacaaaaatcatatcgtagagagctgcttttacacctgtctttcgggcccgctctacggcttgtcgtgccgcgacacccgcagtcccgatactcagtacggctatctcatttccgtcatagagcttgcgacctttcccgataggaatttcgtgcatagggcattcccaatcgacatgacttccgcaaccgcgaggatagcgaatggcaaacggcccgcggtcggatagttgtgctgtgtacatgagatgtcgcagataatgttcgtccataggtgcagcaatagtcatattgggtatgcaacgcaaatagcacatatcgaatgcaccgtgatgggtaaccccgtcttctcccacgagtccagcgcggtcgatacaaaatgttaccggtaagttttgtatggcgacatcgtgaatgacttcgtcgaatcctctttggagaaaagtcgaatagatactgcaaaatggttgtaatccttctttggccaaaccagcggcaaaggtgacggcatgttcttcggagataccgacatcaaaagacctttcgggaaatttctccatcatgaaacatgtagaacttcccgttggcattgcaggtgtgataactgttattttatcgttttttttagccaattcgacaagcgtgagtccgaatacatcttgaaatttgggaggtttttgctcttctgttacggtaattctatcgcccgtttctggattaaaacagcccggagcgtgccaaatagtcggttctttttcggccggagcatatcctttccctttgatcgtacgtaggtgaagtattttcggaccggtcatatcttttatatcgttgagtttattgacgatattaaccacattgtgcccgtctatgggaccgaaatatcgtatatttaaaccttcgaaaatgttttgttgcttggttagcaaagcttttaggctattgttgaaacgtaaaatggcccccctgtgttcatcgtctatcagatttagcttacgtagggtacgataagcatcgtatctgagtttattatagcttttcgatgtagtgatgtttactagatattcgtttagccctccgacattatggtcgattgccatatcgttgtcgttcagtatgatgagcaagttattgggactgatggatgcgttattcaatccttcgaaagctaatcctccggcaatggaggcatctccgatgacagcaatgacttttctttctttttgttcgtgtttcagttgtgtagcaatggccatgcctaatgctgctgatatagaattagatgcatgtccggcaatgaaagcgtcgtattcgctttcggctgggtttggaaatccactcaatccgttgagtttacgacaagtataaaacctgtctcgtctttcagttaaaatcttatgcccgtaggcttgatgtcccacgtcccaaactatgcggtcgtatggagtgtcgaatacatagtgtaaggccacggtcaattccacggcccccatgctagacccaaaatgtcccggattatgggcgagagtattgataatgaaatgcctgatttcgtcacacacttggggtagctcgctaacctgtaatcttcgtaaatcggcgggtgtgtttatttgtttcagtagttctgtattgtcggggttcatttttagtctcttttacgtaaatacaatggtactatttacctttactctcttgcttccatcgtttgtagagtggaacgaatacaatgattcccgaagcaatgatagcgaacagagcttgcccgtcgatgcctcttcccctaattagaagaacgcataagaatgcccataataaggctatgcatgaaatacggaacgtattatattttctcatgttaatccataggtttgttagtgcgcttatatatacgcctaagttaacctacaaatataaatattcttttgcaatccatgaaaatattgtatcaatttcattttataaagttagtaaggcagggcgtgcgtgaaatgaaaaaggcttgtgttaagcaagcctttttcatgattttgagctattctatgttttttctcacttgggtgaggtattctttcatttttatggaatctttacgctcgataatatcgaggagagacgataactgcttctgtattccccgcacttggtcgggagtattgggattgaaaagaatttcggttagcaggtagtcgtcttccgaaagtagccctcttgctatgtccatgtgttttttgaatgtcgtgccgggagcctcttgatgtttcataatcgaggcgaacaccaacgtcgaagtgaatggaaccgagagcgaataagctatggtttcgtcatgctctttaaaactgtattcgaatatattcaatctcaggcgctggtaaatatctttgaaaaagattttgcccatgtggtcgccttcggtaatgatgattgtattttgtgtacttaggtcgctcaaattagcgaatgttggtccgaacatagggtgtgtcgatacgaatgggtgtcgggcttgggcataaaattcgggtaatccggtcttgaccgaagcaatatccgataggattgtgtgagccggtaaatagggaagaacggtttgaaacgcttctatcgtatattttacggttgccgcattgatgactaagtcgggcgtaaaatcttgtatttcttctggccgggtcattcgcaaagtattgaatgcgaatctcagtcgataagggtctatgtcgtatagggcgatttcatggtcgaaactgagtacatcggcaaagaaagagcccatttttccggctccgagaattactattttcattgtttttatttattaataatatccatttgttgatgtaccgattcttcgtgaatggcttgcatcacttctttcatgaattctccgctcattcccaactcaacggcttgtgccatgcgtttttgtaggatttcgtcatagcggttagtttgcagcacgggcatactgtgctcttttttatattgcccgatttctctggatatgcgcatgcgtttggctaacagttcgagcagttgattgtcgaggttgtctatttggtgacgtagttccgataggttttctgtcgtctgtgtggtctctcgtattaccaacatgttgagtatatagtccagagcgtcgggggtcacttgctgatttttatcgctccatgcacaatcggggtcgcaatgggattcaacgattagtccgtcgaatcccagatccatcgcttgttggctcaatggtgctacaagttcgcgtttaccgccgatgtggctagggtcgcaaaaaataggaagattggggagacggcgacgtagttcgatgggaatgtgccattgaggcatattgcggtacaactgtttgtcgtagctgctaaaaccccggtgtatgactgccagtcggtggagaccagcgttataaatgcgttcgacggctcctatccatagttctaggtcgggatttaccggattcttgatgagtaccggaatgtctacacctttcagtgcgttggctatttcttgaaccgcaaagggattggcggtcgtgcgtgctccgatccataaaatgtcgataccatgttttaatgcttcgaatacgtgccgttcagtggcaacctctgttgccgtgtacataccggtttcttctttgacgtgttttaaccaagcaaggccttctacgcctataccttcgaatccgcccggtttggtacgaggcttccatatacctgcacgaaatattttaatgccgcgctcggcgaggcttttcgctgtggtcattacttgctcttcggtttcggcgctacatgggccggctatgataatagggcgtttagagtctattccgggaagtaaaattgattgtaaatcttccataatggtattgttatttatttgatttgattttttctatacggtgtaacgcttcttgcatctttttttcgggggcgcaaagcgaaatgcgaatatatctgttccctcgacttccgaaaatgaatcccggggtaatgaagacgtgcgcgttgtataatatttcgtcggctaacgattcggcatctgttgcactatcgggaatttttccccatacgaacaatcctgcttgtgacggatcataactgcaaccgagagctttcatgattttttctgcgatatcacgtcggttacggtacacttcgtttaattggtcataccattcttgactgcatgacaatgcttttgtcgcagccatttgtagcggacggaacattcctgaatcgatattacttttcactttcaaaatccattcgataaattgagggttggaagcaagcataccgattcgccaaccggacatattgtgagatttgcttaaagaattcatttcgatacaaatgtccttagacccggggacagctagtatactcatcggattgtcgttgagaatgaaactgtacgggttgtcgttcacgatgattatgttgtgacgcttcccgaaatccaccagcttggtaaacaattccatagatgctttggctcccgtaggcatattgggatagttgacccacattaactttatacgatcgagcggtaacgattctaattgcttgaagtcgggttgccaatggttattttcgtcgaggtcgtaggtgaaaatttcggcttcggccagtcggctgacggaactgtatgtggggtatcccggattgggaaccaataccccgtctccggcattgagaaatgccagactgatgtgcaatataccctctttggaccctataaggggttgtatttctttttgaggatcgagtgttacattgtaccatctgttataccaatcggcgaaggctcggcgtagttcgggtaggcctatgtaaggttggtatccgtgaacatcagatttccggctctccgtacacagggtttcaatcgtttcggggtggggaggcctgtcaggcccgcctatgcccagactgataatatccaaaccgcgggcatttagttcggctatttctttcaacttttttgagaagtagtattcgcttatgttatttacccgattagcgggtctgatattaaaggggttgattgaattctgcatattctccaagtattttaaagtcttttgttagaggtcttattgcttcgagggattgtttgtatcgagtgaaattatcaaatgtaaggtctatataaaatcggtattcccattctttcccgataatgggcatggactgtattttggacaaattgatgtcatagaaagaaagtatggtgagtacttttgataaactgccttgtgtatgtggcaaactgaaaacaagtgaagctttgtttatgcgtttgcctgctattaaaatttcacggtgagaaggatcggcaagaattagaaaacgagtgaaatttcgtttattggtttcgataccttctgccaagatattcatgttatagatttcggcagccagtttaccgcaaatggcagcatgtcccgaaagatgacggtgtgaaatttcttgggcactaccggccgtatcgtctttttctacgactttcattttagggtgagcttgtaaaaaatcaccgcattgcattaatgccatggggtgagagttcacttcgaggagatcgtccatagtttctcccggtagtgcggccagtacgtgagaaatacgtaatttatattctcctatgatacttaattcactttttcgtaatagttcgtgattctgtaaaatgctgcctgcaatggtgttttcaatggcaatgatacccaataaagaacggtcgttattcatgcggtcgaacatttcgggaaatgtcgagcagggaaccgtttctatttcttcttccccgaaataagatcgggcggcggcctcgtggtagcaaccggctatgccttgtatggtgacttttttattcataagcaagataaataaaaaatcccgttcgtattgaacgggattttatcataagtttcttaattgttttctatttcttttttttgcataaaaccccgtttctatttttctccaaaataaaaataaaagtaaaagtaatatgcaaaatcaaaattcttcattgcctgtcaaatatgagtttgatgttgcaaatgtaatgaaatcatttttgaatccaaacaaatagttatatatttttgaataaaacgagattttttttatcgcatcgttttgtatatggtatttgaaacttgctttgtatgtgacgaataggagaaaattttgcataacggcgatgtctacggattttttcgctatctttgtcgtgaatgtaaaggtaagttgagccgggcatgactaaataaattggtttccatcttcggttatactatctttgaagtacaaataattatgtatttatggaaacttcggaattaacacttttttctgcaatgtgtgagtctttttgtacggcagtggagaaggctcgtgcagaggcgatgtccttgaccgatatgtatgtgcaggtgaaatacgacgaacagttgttttcggtatttgatgatactgaaagtatattggtgcaatcggtaattgatggattggacgagtggcgagattccagtggagaacgttcggatgctgcgataattgcttttctgaggaaggtgttgagtcatgaagatgtgaatcatgctttgcattcgctggatattatacctcccttttctgtcgtgttggtagataatgagatggagcccgttgccgatttgattacattggacgatgagaatatctatttgcacgatgatttttgggaaaaaatggataaagagcttgacgatttttttgaacaattgatgtccgatacgaagtaaggttgggtattggagttcaaaggaggctgctcttgcggagtggaaagtcttttcacgatataggtagaaagaaaaaaattaataataatttgattatcgaaagataagcactaattttgcgctctcaaatttgcacgctttttgtggaaagttgagaataaatttgtgagtctaatttaataaaatcataagaatgaacgtttcgcatcaaaacactgacaacctgaatgccgtgatttcgattgaaatttcaaaggctgactatcaggaaaaagtagacaaatctcttcgtgcttatgggcaaaaagcgaatattcccggattcagaaaagggaaagttccttttagtatgctcatgaagatgtttggaaaatcggttcgagttgaagaaattaatcgtttggtttccgagtctctgtacaattatattcgtgataataagctcaatatcttgggcgagccgatgaccgcagaagatatgactgtcgatttggatacacaagacgatttcacgttccgttttgatgtggcattagcccccgaattgaatgtaaaggtcgataaaaaaataaaagtaccttactatacgattactgtcgatgatgacatggtaaaacgtcagaatgaatcctttttgtcacgtttcggtaaacagatttcggtagatgagtctaccgatgaaagagaccttatcaaaggttcgatggtagaaatggtaaaaaaagggactccggtagaagggggaattacggtcgaaagtaccatcgtttctcctgcatatttcaagaatgacaaggaaaaagctaaatttgccggtgtgaagaaaggtgacaaagtgatgttcaatccttcgaaaagttgtgatgcttcggtcgcagaactggcctctatgttgaatatcgataaggaaaaagctgccaatgtgacatcgaatttcgagatgacagtgacagatatcacacatttgcaacctgccgaattgaatcaagaattatttgacaatgtattcggtaaagatgttgtaaaaacagaagaggaatattttgctaaacttcgtgaaatgatagcgcatcaattggttcctgaaagcgattataaattttcgattgatgcacgtgctgcgatagaaaaggcagtaggtgaatttgatttgcccgatgcatttttgaaacgttggttgttggctaccgataaaaatcgtaaagctgaaaatatcgatgaggattttgcgaagatggttcccgatttgaaatggcagttgattaaagaacaaatcgtaaaacaattcgatattcatgtcgatgatgccgatttgttggctttggcaaaacgggtagcggcaagtcagttcgcacaatatggtatgacaggtgttcccgatgatgttctcgaacgttatgctagggaaatgttatcgagcaaagagtctcgttcgcgtcttattgaccaagctacggagcagaagattcaaactgccattaaggagtctgtaacgcttacggacaaagaagtgacgatggataaattccagaaaatgtttgaagttgccgagtaataaaatcgatataattatcgatagccccgagacgtaatggcttcggggcttttcattgtttgaaatcttccaatatagttaattgatgcttgtagttcggttgatgtattattttttgtgaagatattggcaaaaaagaccgggcagcagaattttatttggggtataattgtttttatttatatctttgactaaaaatagggattaaaaaacaatctaaaaacgatataattatgactaatgattttagaaaatatgcggtaaaacatttgggtatgaatggacttgcccttgatcaatatgcgcagtttaccagtagctatctttccccttctattatggaggagcgccaactgaatgtaacccagatggacgtgttttcgcgtttaatgatggaccgtataatctttttgggaactcctatcgatgattatacatcgaatgttatagaagcacagttgctttatctcgattctgccgacccgggtaaagatatatctatttatttcaatactcccggagggtcggtatatgccgggttgggtatctacgataccatgcagttcataagcagtgatatttctacgatctgtacaggtatggccgcctcgatgggcgctgtattgttggttgcagggacaaagggaaaacgttttgctttgaaacattcccgggttatgatacatcaaccgatgggaggcgcacaaggtcaggcttcggatatagagattacggcaagggagatacagaaacttaaaaaagaactctataccattatagccgatcattcgggaaactcgtatgagcgtgtggagaaagattccgatcgtgattattggatgactgctcttgaagccaaagaatacggtatgattgacgacgtattggtaaaatctatgaaataatattctaggaatggctaagggcgaaaagtgtagtttttgcggaagaggagaaaatgaggtaagattattaatgccggggcgggacggttgtatttgcgacgagtgtgccgagcaagcctatctcctttccgaagaatatttgcataaaaagaaaaaagcgagttccaaatggaccgtatcccgagaggatttacctaaaccggaagagataaaaacatttctcgatcagtatgttatcgggcaggacgatgccaagcgttatttgtcggtttcggtctataaccattataaacgtgttttgcaggtagccgataatgatgatgttgagattgagaaatcgaatattattatggtcggccctaccggaaccggaaagaccttattggcgaagacgattgctcgtttattgaaagttccgtttacgattgtcgatgctactgtcttgaccgaggccggttatgtgggtgaggatatcgaaagcattttgacccgtttgctgcaagttgccgattatgatgtcgaggcggctgagcgaggtattgtgtttatcgacgagatcgacaaaattgctcgtaaaagcgataatccttcgattacccgtgatgtcagcggtgagggcgtacagcaaggtttgttgaaattattggagggttctatcgtaaatgttccgccgcaaggcgggcgtaaacaccccgagcagaaaatgataccagtgaatacaaagaatattttgtatatttgtggcggggcttttgacggaatagaacgtaaaatcgccatgaggttgaacacccatgtcgtaggttataatggaggtggtagcaatggtcgtatagatcgggaaaatctgttacagtatattgcgccccaagatttgaaatcgtttggtcttattcctgaaattataggacgattgcccattttaacctatttgcaacctttggacaaggccgcgctacggagaattctggtagagcctaagaattcgattatcaaacaatatatcaaacttttcgaaatggacggagtgaaactttcgtttgatgaggatatgcttgattatgttgtcgaaaaggccgtagagttcaagttgggagcccgaggattgcgctctattgtcgaaacgattatgatggatgctatgtatgaaacgccttcttcgacaaaaaagaaattgcatataacacgtagctatgcagaaaagaagttagaaaaagcaaaactattggcagtataagaaaaaacagcaagaaaaaatttggtaattaagaggagttgtttataaatttgtttgaccgataaaggtcggcgaatatacataacgagaaagagagtaaccgtatggcaaaagaagtaaatttgactgaggaactgaaaaggaatttcggattcgatacatttaagggaaatcaggaagcgattatcagaaatttgcttgccgggaatgatacatttgtattgatgcctaccggaggagggaagtcgctttgttatcaattgccgtcgttgattcttgacggtactgcgatagttatttcgcctttgattgcattgatgaagaatcaggtcgatgctatgcggaatttcagtgccgaagatggtgtcgctcatttcataaactcctctttgaacaaaactgcgatagaccaagtaaaaaccgatattttatcggggaaaaccaaattgttatatgttgctcctgaatccttgacgaaggaagaaaacattgattttcttaaacaggtgaatgtgtcgttttatgcggtagatgaagcccattgtatttcggaatggggacatgatttccgtcctgaatatcgacgtatccgacctattattaatgagattggcgtacgtcctgtaatagctcttaccgcgactgcgactccgaaagtccagcatgatatacagaagaatctgggcatgttggaagctactgtatttaagtcgtcgtttaatcgtcctaatctttattatgaggttcgcccgaaaacagcgaatatcgataaagacattattaaatatataaaatcgcaggagggtaaatcgggtataatctattgtttgagtcgaaagaaagtagaagaactggcagaattgttacaggtaaacggaattcgtgcgctgccatatcatgccggaatggactctgcgactaggactcagaatcaagatgcattcttgttggagaaaatagatgttatcgttgccacgatagcctttggtatggggattgataagcccgatgtcaggtatgtcatacattacgatatacccaaaagtctggaaggctattatcaagagacgggacgagccggtcgagatggaggagaaggtcagtgtataactttttatatcaataaagatttacagaaactcgaaaaattcatgcagggaaaacccattgccgagcaagagattggtaaacagcttttgttagaaactgctgcttatgccgaatcttctctttgtcgtcgcaagattttactgcattattttggagaagagtatgaggaagataattgtggaaattgtgataattgcctaaatcctaaaaagcaagtggaagcaaaagatcaactttgtgcggttcttgaaactattattgcactgaaagaaaaatttaaagccgaatatgtgatagatgtcttgttaggtaaagaaacgagccaaatactttcgtatcaacatgaagatttagaggtgtttggaagcggacagggtgaagatgagcgcacgtggaacgccgtcattcgacaagcattgatagccggctacataggtaaagatattgagaattatggactattgaaggtaacgaaggctgggcatgcgtttttgaagaatccggtttcgtttaagattgtcaaagatgtcgattttgacgaggtggaggaagaagtgcccatgaaaggtggagcttcttgtgcggtcgatcccgagttatattctattttgaaagatttgcgaaagaaaatcgctaaacgattggaacttcctccgtatgtgatttttcaagacccttcattagaagctatggcgacaacctatccgattacaattgaggagttacaaaatattccgggggtaggagcaggtaaagcgaaacgttacggagaagaattcgttaaagtcatcaaagctcatgtggaagaaaatgaaattgagcgtcccgaagatttaagggtgcgtacggttgccaataagtcgaaattgaaagtatccattattcaggccatcgacaggaaaattgcacttgatgaattggccgagtcgaagggccttgaatttggagagttgctcgacgagatagaggcgattgtttattcgggaacgaaaatcaatatcgactatttcctgcacgagattatggatgacgagcatatcgacgatatttttgactacttcaaggagagtgaaagcgatagtctcgaagatgccattgaggagtttggtatggagtatagcgaagaagaaattcgtttgatacgtatcaagttcctttcagagatgggaaattaaaagccgagaaataatagtgaaaaagcgacattccgataatcggttgtcgcttttttattttagcttttggggtgataaataatttaaaaatcttcatgtatagataatagcttgccgaaaaataattatctttgcatgcaataaaattctaatgaaccccattatgtcatttgttgcagaaaaagtggtgatggacggattaacttttgacgatgttttgttaatccccgcttactccgaagtccttcctcgtaatgtcgagttgtcgacgcagttttcacgcaatatccgattaaatattccattagtttcggcagccatggatacggtaaccgaggcgcaattggctattgctatcgctcgtgaaggaggaattggagtcattcataaaaatatgagtatcgaggctcaggcccgtcaagttcatgctgttaaacgagctgagaatggaatgatttatgaccctgtgacaatcaagtgtgggtcgacggtgcgcgaagcgttgtctatgatgagtgaataccatataggagggattcccgtagtggacgataaaaatcttttggtgggtattgtaacgaatcgggacttgcgttttgaacgcgatttggaaagattggtagacgaggtaatgaccaaagacaatttagtgacgacttcacaatccaccgatttgcaacaggctgcggatattcttcaaaggcacaagatagagaagctcccggttgtcgataaagacggccatttggtagggttggttacttataaggatataacgaaagccaaagataaaccgtttgcttgtaaagataaattaggtcggctgcgtgtggctgcgggggtcggtgttacggccgattcgatgactcgtgtggatgcgttggtagaagccggagtcgatgctatcgttatagatacggcgcatggacattctaagggcgtaatcggtgtattgaaagatataaaagcaaaatatccagatatcgatgtcgttgtgggaaatattgcgacgggtgaagccgctaaatttttggtggaagccggagccgacggagtgaaagtaggtataggccccggttccatttgtacgacccgggtgattgccggtgtcggggttcctcaattatctgccgtttatgacgtggcgaaagcattgaaaggaacaggcgtgccattgattgccgatggtggaattcgttattcgggtgatattgtaaaagcattggctgctggggcttactcggttatgttgggcggtatgctagctggtgttgaagaatcgccgggagaaacgatcatattcaatggacgtaagtataagtcatatcggggtatgggatctctcgaagcgatggagaaaggttcgaaagaccgttatttccaagctaatgagactgatactaaaaaattggttcccgagggaattgcggctcgtgttccctttaaaggatctttatatgaagtagtttatcagatggtcggcggtttgcgtgccggaatgggatattgtggagctaaggatatagaggctttacatgatgctaagtttactcgtattaccaatgctggtgtagccgaaagccaccctcatgatgtgtcgataaccagcgaggctccgaattatagtagaggataacttttccgataaggaaggtggatttttatttttgggaagaatacactattttagtgattacgatataattttcttatatttgaagcgttaaaatagtgtattatttttgttgataactcgggactatcaagtctcaataaaatgtagtgcataacacaatgaaaaacaaatggctcttagcggctttgcttgccggaaattcttggtttggagggggggctaccgatgtcgaccctgttattatgagagtgaataataaagatattcacaaatcggaatttgagtatatctataataagaacagccagcaacaaatcgatcataaatctctcgatgaatacgttacactatttaagaactacaagttgaaagtcgccgaggccgaagctatggggattgatacgacttcggcatttaaaaatgaattggcggggtatagagaagagttggctaaaccctatttgatcgatgcttctgttgatgaccgtttggcacatgaggcttatgaccgaatgaaagaagatgtggaggtaagccatattctcataggattgaatgctcggactcctgaggaccgagccgaggcaaagaaaaaagccgaatcggtattggctgaaatcaaggcgggtgaagactttggaatgttggcagagaaattcagtgaagacggatcgaggcagaataagggatatttaggatttattagaggcggacgtacggtttatccttttgaaaaggctgctttcgcattacaagcgggagaagtttccgatatagtggaaacccagttcggatatcacattataaaagtacatagtcgtcgtcccaatccgggagagtttctattttcccatatcatgatattagtgcctcgtggtgcttctgatgaagtaaaagcgcagaaagaatccgagatacgagccatttatgaagaattgaagtcgggagccgattttgctacgatggcaaaggagcggtcggaagataaggcttctgccgtacgaggtggagaattaccgtgggtgagtagtggacaatttgtaaaagagttcgaggatgctgcatttgctcttaaaaataaaggagatattacagagcctgtattatctccctatggctggcatatcattaagttaatggaccggcgggatattaagccctttgaacaaatgcgctcggagattacgcgaatgatggcacgagacgaaagaggtagcatggctcgtaatgcgatggtggctaaattgaaaaatgattatggtttttctttggaagaatcgcagcgggcgaagttgatgaaattggctggcgatttaggtaaagtcgattcttcttatatagcggctattcataatgaccaaagtgttttattctcatttgagaaccattcatatacagtggccgattttgcctcgtttttgtccaaaggccgagatgtgacggtcaatgcacccgattatatttcgactatgattggttatatggccgatatggaaatattagatttcgagaaggctcatttggaagataagtatcccgattttcgtaatttgatgaatgaatatcgagacggcatgttgctgtttgaaattagcaatagggaagtttgggaaaaagcatcgaaagataccgagggcttgcagaagtttttcaagaaaaataggaaaaaatacaaatgggataaacctcattataaaggatttttgattcaatgctgtgatgcggctaccgccgatggcataaagaaccggattaaagaactcgatgacgattctgtaatcgtcgtgttgaatcgagagttcaataccgactctttaacaagagtaaaagtggaacgaggtttgtttgttgagggagataatgaaaaaattgacgaattggtatttaagggagctccggtgaaagccgatgagaagttgccgatagcttttgtgtttggtaaactattgaagaagatgccggaagcgtataccgatgtgagaggacaagtaacggccgattaccaaacttaccttgaaaaagtttgggtgaagaaactcaataaaaaatatccggtagaaatctatgaagatgtcctaaaaacagttaataggccgtagttgccattatttagtcgtaatttagcggatatttatgtaggtaatatagatgtataaagtctcgataatagtattatgcgcagcattttcggcatgccttttttcggcatgccgaagtgggttacagagcgatgaaaattcattggtacaagtgggcgatgaaatactatcgcgtcaagagcttgccgatgccatgccagagggactctctctcgctgatagtaccgattttgccgacaagtatatccgtcgatggatttgtgatgtattactatatcgaatggcacaaaagaatattcccgatatagaacgtattgatgcattggttgagaaataccgacgagatttagtcatattcgaatatcgtaagagattggttaatgaacgggtgacgaagtcttttgatgaacaagaaatgctggattattatgagcgaaactcagaaatgtttcgtttgcatgaagccatcttgaaagggttgtttcttaaagtaccggagaatacgcccaatcttggacagttgaaaaaatggtattgttctacaaatcccgatggagtagaaaagatcgagaaatatgctttgaaaaatgcggtgatctatgactacttttatgacaagtggataccgtttgaagaaatcgtcaataatattccatacgagtttggagatgctgaatcctttttaaagacacatcataagttggaatttaataaaaacggatattggtatttactgaatattacagaatatcgtttgccgggagaagaaatgccttatgattttgctcgggctcaaattcaggaaattttgacaaatagcaatcggttgaactttgatcgggagctggaagaaaatctgtatcgggatgccgagaagtcgggtgatataaagtggttgtataaaggtgagaaatctattgaaaaagagagtataaaataattgaattatgtgtaaagttactgattggcttttatttttctttatggcggtgtctttgccggctttttccgatgacaatgttatcgatgaggttgtatggataataggagatgaagctatttataagtctgaggttgaagagcaatatcgacaaatgcaatacgacggacaacgtattgatggcgatccttattgtgtaatacccgaacagcttgccgtgcagaaactttttctgcatcaggcgaaactggatacgattacagttcctgatgctactgtttttcaacaagtagaggctcgtatcaattatctgatcgctaatatcgggtcgaaggaaaaaatggaagaatactttaaaaagccggtaaccgaaattcgtgaagagttggcgaatgttattcgtgatcagggaaccgtacaggaagtacaacgaaatttggtaaaagatgtaaaaaccacaccggccgaggtgcgtaagttttataatcaattgccggccgacagtattccttatattcccatgcaggtagaagtccaaattattactttgaatcctaaggttccgcagcaggaaatagataatgtgaaagctcgattgcgtgatttcagcgaacaagtaaataaaggcgagcgagatttctctactcttgcggttctttattccgaagatcggggatctgccatgatggggggagaaatgggcttcgtgagcaaaagcaatttggtgccggagtttgccaatgtcgcgtttaacttgaatgacccgaagaaggtttctaaaattgtggagaccgaatatggttaccatattatacagttgatagagaagagaggcgaccgtataaatgttcggcatatactacttcgtccgcacgtttccgagaaagatatatccgatgctttggttcgtctcgattcgttgagggtagatttaatagataagaaaatatcgttcgatgaaataacccaatatgtttcgcaagacaaggatactcgcaataacaagggacttatggtaaaccctcaaaccggaaattctaagttcgaaatgggacaattgccccaagatgtggctaaggtggttgccgatttgaaggtgggcgaaatttcgaaaccgtttgtcatgaccgacgaacgtaaaaataaagaggtggttgcaatcgtaaagctgaaaaacagaatagatggacataaagccaatatgtctgatgattatcaaaccttaaaagctattgtagaggaaaagaagaagaccgatatattgaatgagtggttggctaagaagcaaagcgagacatatatccgcataaaagaaggttggcgaaactgcgaatttaagtatgacggttggataaagaaataagatcgacgccaatggggcatcaaaaaagaataaaagatgaaaagggaaggcataaaatactggtcggtattttatgcctgcttactcttggtatgtgggcggcatcgggcactcccgaaaaaaaacttcctaaacaggacgatcccgataaagtgtacttggtgaatagtgacgaacttactttcgataaggagcagagtgccgattatcgagtattgaggggaaatgttgtctttcggaaagatagtatgtatatgtactgcgacagtgcatatttttatgaaaaagacaactcactcgatgcatttagtaatgttcgcatggagcagggcgatactctgtttatttatggagatgtgttatattatcgtggagatgagcagatagctcgactgcggaataatgtgcgcatggaaaacagagatgtaactttgtttaccgatagtttgaattatgagatgattccgaatatcggctattatttcgatgggggcaaattggttgattctcagaatgaattgacttctgtatatggtcaatattcccccgataccaaacagtcggtcttcaatttcgatgtgcagttggtgaatgaaaaatatacattatattccgatacgctcgaatataatacgcagactaagattgccgatattgtgggtccttcgactattgtgtcggatagtaatatcatttattcgtcggcgggttggtataataccgaaactgataaatcgatgcttttggatcgttctttggttacgtcgaaaggacagagccttacgggggatacgattttttacgataggcgatcgggattcggagaagtgttcggtaatatggtgctcaacgactccattcgttcgttgattatggagggacaatatggtttctacaatgaaagaaccgagtattcgtttgcgacagattcggcacgcttattggagttttcgcgaggcgatacgttgtatttgcatgccgatactcttaaatctcacttggtattgcccgattccacccgtcttttgcaggcctatcatggtgtgagattttttaggatagatgcgcagggagtttgtgattctatggagtttacgtcggtagattcgcttcttcacatgtataaactccctatcatttggaatgaaaattatcagataaccggagatacgattcgtatacacatgaatgacagtacggtcgattgggccttgattcccgggtctgcttttgctgcacagcataaagattctgttttttatgatcaagtttccggtaaggagttgaaagcatggtttgagcaagggcagttgcgtcaaatagatgtaaatggcaatgctcaaacgattttctatcctcaggaacgggattcgacattgacagggctgaataaagccgaaagcggatttttgagaatgtacttgaaaaatcagcagatggagaagataattatttggcctcaaccgcagggaagcatgactccgttggacttgataaagcccgagcagctatatttaccggcctataaatggtatagtgatttgaggccggtaagccccgaagacatatttcgaaaaccagaagtgaaaatagaagttgttgaagagaaaaaacatcgcttcaatcattaagatttggtcgaattatgagtgatatcatacatttattgcccgattctgtggctaatcaaattgcagctggagaagtgatacaacgtccggcctcggtaattaaagaattggtggagaatgctgtcgatgcgggtgctacgtctattcagattattttgaaagatgcaggacgtactcttattcaggtgatagacgacggcaaaggaatgtctccgaccgatgcccggttagccttcgaacgtcattcgacttctaaaattcgttcggccgacgatttattctcgctacgtacgatggggtttcgaggagaagcgttggcttctatcgccgctatttctcaggtagagcttcgtacgcgcagagtcgacgatgaggtaggcacttgtatacgtatgtcggcttcccaatgtgaaggtcaggaggcgatttctactcctgtggggagtaattttgcggtaaaaaatatcttttttaatgtgccagcacgacgtaaatttcttaaatccaatcaggtggaattgagcaatatactcaatgagtttgagcgtatggcattgattaatactcagattagttttattctcgtccataatgactcggaattgtataatttgccggctaccaatttgaggcagcgtattgttgcactttttggtaagagtcttaatcagcagttactttctttgggaacggaaacgtctttggtgaagatttcgggttatgtggggcgtcccgaagctgctcgcaaaagaggagcattacaatatttttttgtaaatggccggtatatgcgccacccatattttcataaagcggtgacgatttgttacgaacatttgataccggtcggtgaaatgcccaattactttatcaatcttacggtcgatcccgagacgattgatgtgaatatccacccgactaagaccgaaataaaatttgagaacgagcagcccatctggcaaattctttctgcctctgtaaaggaagcattgggaaaattcagtacggctccctctatcgatttcgatatggaagatgcaccggaaattccaacatcgaagccgggcacacatgttcttccccctacggttcatgtggatacgacgtataacccttttcgagcaggaggtggcggttcttctgtgaagagaccgaattatgattggcagcagctttatagcagctttaacaatacaaaagaaggttcgaccgttcagcccgattcagacaacgattttccgtctaaattggatttctctgatggatatgtttctaatttttctagtgaaggggaacaatcggtttttcctgagttcgagtcgaaactgaatcaaagcggtaggactgtgttgcagttgaaagggaaatacattatgacttcttcggctgaggggttaatggtgatagatcaacatcgggctcatggcataattttgtttgagcgttttatggtgggaatatcctctcgcgaaatggcttcgcaacgtgttttgttccccgaaatcatgcaattgacagtctctcaatcagaaactttacatggaatctgggaagaattgatagcacttggatttgatttagccgatatggggcagaatagctattctatcaatgcgataccggccggtatagaagggatagatgtacgagaccttattgggcaaatgcttgtaactgcttcggagaaagaacatgatgcaaaggcttcgttgcaaaagcgtatggcttggactttggccgaggctgctgctgtaccggtgggacagtctctttctcaggaagaaatgttgtctatggtcgatgatttgttatctttgaaaacaccggcttatacacccgatggcaaatcggtttttatcatcgtttcgtatgacgagttgcagaagcagtttaattgattgagttatgttgattttgttgtctccggcaaaaacgatggtagggagtagtagaactactgttccttttgttaccgttccgttatataaaaatgaggccgagcatatagcgatggaaatggctggttattcggtcgaagaactgtcgggtatgctggggataaatcgtaatttggccttgcagacgaaagagagatataatgtatttcattcgcccgacgtgtatggattaccggctcttttggcctataccggtattgtctttcgttacatttcgccggccgattttaccgaggccgattttgaatatgctcagaatcatctgcgtatggcatcggcttgttacggattgactcggccgctcgatgtaataaaaccctaccgcatggaatatgctgttgaattgccttcgatgggtattcctgtttcggaatattggaagccgcttttaaccgataaattgattgacgatacaaaagaggctggtggaatattggtcaatttggcaagccgtgaaatccagcaatcgttcgattggtctcgaataaataaaagggtacgagtaatcactcccgaatttaaagtatataaaggcgacgggtttaagacaatcgtgatatatgcgaaaatgatgagaggggcgatgactcgttatattctaaaaaacaaaatatctcaccccgacgatatttgttctttctcggcagagggcttccacttctcgcctgaacattcgagcgaaaataatcctgtatttgtcgtttaatcagcgttgttgtcttgttatataaatagttccggttcttttcttgtttcgcatttttccttgaaagcccgaatagatagaaataatttcagtggatttatttttctcgcattttgaggacagacggcgatacatctcatgcaagagatacatttgctttcgtccgtcattcggggattctcttggggaatagcgttggtggggcataatgccgcgcatttcccgcactgtgtgcattttttaccggcacgaggtttcaggggtactccgttatatattttataatcagcatttcctttcacttgtatttctgtgaaactctctccatttttcagttgcaccaatttagttttgatttgttctgaaaaattctttaagatcgtttcatcgtcagaatccggacgacctttggcataaaccctcatgatagaatgctcggcaatacaggcgatacaagcaacggtttgaaatccgttcgattccatcgttgtttttaattcaagtaaagcatcgtcgtaatcccgattcccatagacgaccacgagtatagccggggtgttatgcccggttatacgtttcagtcgatctatggctacggaaggaactctccctccatacacaggaacagctactaatagggtgtcttccccatttagctcgtaagagttctgttgccgtgtatggtcggtaatatctatttccgtagcctgagggtctatctctttgccgatgatataggcagcctttcgggttccacccgtcgggctgaaataaacgatgtgcatttttttattgtttgtttctacgctcctgaacaatggcatcgagaacagcgaccgtcgttaggttgacaatatctctcgtcgagctggcaatatcggtgaagtgaataggcttgttcaatcccatttgtatcgggccgatagactctgccacacccatttccagcatcattttataagccgagttcgccgaacttaaattcgggaaaacaatcgtatttacttctctccctttcagcttgttgaacgggtacgatttgtctcggagtttattattgagggcaaagttcatttgcatttctccgtcgatgatgatttcgggatattgttcgtgtaaaattttaatggcttcgtgtactcttaggggacttccttgattatccgacccgaagttagaataggataccatagcgataacaggatctttggcaaaaaaccttacagagtcataggacaattttgcaatgtcgattaatgtttcggtagtcggtttccgattgatgagtgtatcggcaaggaaataagtcccgcacttggtgttcatgatgtgcatagctccgaaatgtttgtatccttcgcgtataccgataacctcttttgcaatctgtatagtctctgcatacttggagtatgtgcctgtgatgaaggcgtcggcttctccggcttcgaccatcatcataccgaaataattgcggtcgaacatcttttcatgagcttcggcgtaggtcatgccctcgcgttgtctcttttctgtaagaagctgtgcgtagcggatacggcggtcttcttcgttcggatgcctcaaattgataatttgcatgcccgataaatctacacctatggactctgccaactttcctattaactcatcgtttcctaataaaataggtttacaaatgccctctttcattgccgtagaagctgcttgtaacatattggcatgattggcttcggcaaacacgacacgtttgggctctttgcgggccatttcggtaaattcccgtaacatcttgttgtcatatcccatcagctttttcagccggtcattgtaggcatcccagtcggtgatgtgatgctgggcgacaccagagtccatcgctgctttggcgactgcgggggctactgcggtcaatagtctggggtcgagagctttggggataatatattcgggaccgaacgaaagtctctttattccataggccgagttgacaacatcgggtacaggttctttggttagtttggcaatggcatacgtagcagccagtttcatctcttcgttaatggcggtagcgcgaacatcgagagctcctctgaaaatgtaagggaatcccaatacattatttatttggttgggatagtccgaccgaccggtagcgaatatcaaatctttgcgagaagccattgctttatcgtaagatatttcgggattaggattggccaatgcgaatacgatgggcttttcattcatggattgtaccatttctgttgtcaagacatcggccacggaaagtcccagaaaaatatccgctccgcgcatggcatcggctaaggtctttatatcggttcgttcggtggcgaattgcttttttgccggcgacaaatcggtgcggctggtgctgatgacccctttgctgtccaccatgacgatgttctcttttttaatgcccaatcccatgtataatttcgtacaagagctggctgcggctccggcgccgttaacgacgagtttcgcctcttctatttttttcccttgtatatcgagagcatttaaaagtccggccccggaaataatcgctgttccgtgctgatcgtcgtgcataacggggatatttagttcctcttttaatcgggtttctatttcgaaacactcgggagcttttatatcttccaaatttatacctccgaaagtgggggatatggcttttactgcggcaataaatttgtcagggtctttttcattgacctcaatatcgaatacgtcgatacctgcgaatatcttgaatagcaagcctttcccttccatgacgggctttccggccaaagcaccgatgtcgcctaaacccaatacagccgtcccgttggaaatgactgctactaaattacctttggccgtgtattcatacgccttttctgcatcttgttctatttcaagacacggttctgctactcccggagtataggctagggataggtctcgttgtgtactataaggtttggtaggaattacttctatttttccagctttaccttcactgtgatattttaaggcatcttcttttgaaacttttgacataagtatactatttagtggtttatctgtttaatttgtattcctaaaagttaaataacttttaatttgtaagcatatcgagtacaaatgtagcaaatttatctcatctcttatgttaagaaaaacatttctttaaaaataaaagttttacaaggggaatcagctctttcgatattctttgggtgataatccgatttgatgtttaaaatatttactgaaaaaagtttgtgagggaaagttcagttcattgctgatttgctgaatcgtcatacttgaatttttgagtaatctttgagcctccaaaatgacatacctctttatccattcgctagccgatatgccgctattattttttacggttgtagataaatatttggctgtaatacatagcttgtcggcatagaaattcaactgtctatattttttgaaatttttttctaccaaatctaagaattcgtaggtaatatagtcggctcttgtcttttcgttttttttgtaagaacttatttgtttccaaactgtcgaatagaaaagtgctacggtaaggtgttgtatcgattttattcggaaaggattatcagtatcggctattatcttttttatgtaagcacaatagtccaataatgcagttaaagtttcctgagataaatgatgagatatattgtcctgccgggggaaccttaataataaaatttcatttttggaatacgatgcgatattgctggcgaagtttttggtaaaagcaatgcaaatgatataaaaatcttcgctgttactatcgtgttgtaaaatttgattgggataaatgctgattacgcaaggagctattgcattatactctatggaatttatttttcctttaacccaacctttcaggacaatacataatgtgaatgcttctgctttgtaaggatagttgaattttgataaatccgagatattatctttattaatctctatcaaagcgaactcgttatcgacatgtaaaacatgtttgtaatgattgaagctctcgttgggaatatcggttatgtgaatggtcataaatatttttattttttcggagcaaaaatagtctaatagtcttgtaaataatcttgaatgagaaaaatagacctgaatagggggataaaaggactcatttgtatgtaaagatggatttatatttgcagccgaaataaaatctctgaaagagaatttgtaatagaatgaaggatataatttttatttattttattttttcattctttccagctattatacagagtttatgcctaaatttgtagcattcgaaatgtgtttgaaaaatccctgtttataggggttataaaggttttatgtaggtattgattaaatttatcaataagttgtgtttaataatttttaatataaaattttaactcgacttggaatatcaacgttgaaaataatttttgttgcttatgaaattgactaaaaattttattcagcctatcgcaggtgcgatgctttgtatttttttattttcctgtggaggaaaaaatgcccagaatggaggcggaatggttcgcgaatatgccgtaatgacattacagcccgattcgatggagtggtatagcaattaccctgctgcaattaagggtaagcgggatattgagatacgtccgaatgttagtggctttattacagatttgagagtcgatgaggggtctgtcgtaagaaaaggtcaagttcttttcgttatcgatacagtcccgtacaaagctgcattgaaagtcgccgagactaatgtagaggtagcgaaagccagtaccgaaaccgctcgccttacggcagaaaacaaacgggagttgcagagacgagacatcatcagcgaatatgatttgcaaatggccgaaaactcttatgcttcggctaaggcccagttggctcaggcggaagcccaattggtaaatgcccgtaataacgattcctatacgagagttatcagtccgctcgatggagtagtgggagagattcctttccgtgtggggagtttggtgtcgccgtcttcggccactccgcttaccactgtttcggataattccgagatgtatgtttacttttcgatgaccgagcggcaaattttggaattggtggcacaatacggtgctgagaattttttgcaaaaacttccgactgtatcgttgaaactttccgatggtagtatatacccgttgaaggggcggatcgaaacggtcagtggaattatagatacacagacaggctcctcgaatatgcgtgctacttttgaaaatccgaataggttgttgcgtagcggaggttcgggagttatcatgattcctatgaaaaacgaccatgctattttggttccgcaaaaagctacttacgaaattcaagataagaaatttgtttatgttttaaatgacgactctacggtgacttctaccgaaataaccattgcatcgatcgacaacggaaaagagtatatggtaacttcgggattgaaagccggggatcgtatcgtgacagaaggtgtcaatactttgaaggacggcatgactattaaggctgccggttcgcaaaataatcaataacaagaacttcaaatagataaaagattatgaagttagatagatttatcaaccgcccggtattatcgaccgttatttccatttttatggtcatactgggtgttataggacttgtatttttaccgattacgcaatatccagatattgctcctcctactatacaagtttcgacaacttatacaggagctaacgctcaaaccatattgaatagtgttatagctccgttggaagagtccataaatggtgtggaaaacatgctatacatgacttctacggcaaccaatacaggatcggcgtcgatcaacgtatattttaagcaaggaaccgatcccgatatggctgccgtgaatgtgcagaacagggttgctaaggctcaaaatctgttgccggcagaagtaacgcgggtgggtgtgattaccgaaaaacgtcagacgagtatgttgatggtattctctctgttcagtcccgacgaccggtacagcttggagttccttgaaaattatgcaaaaattaatgtcctccccttaattcagcgtgtatctggtgtcggtgctgccgatgttatggcgacagactattctatgcgtatttggttgaaacccgatgttatggcgcaatatggtttgatgccggcggatattgcaggtattttggctgagcagaatatcgaagccgctcccggtcagttcggagatcagggaaatcaatcgttccaatacgttttgacctataaaggccgtttacaaacccctgaggagtttggtaatatggtgatacgagcaaacgacgatgggcaaattttgtacttgaaagatgttgccgatattgaattaggtcggttgacctatgggtttaaaaacttccagaacgggcataatgcggtaagtgcgatggtctatcaggctgccggatccaatgccactgcaattatcggcgatattacaaatttgttggaagatataaagaaagaccttccccccggaatggaaatcgaaacgactttgaatgctaacgacttcctgtttgcttcgattcacgaggtaatcaagacccttatcgaagcctttattttggtgttctttgtagtgtatgtcttcttgcaagatttccgttcgacgttgattcccgctatcgctattccggtgtcgttgatcggtacgttctttgccttgtatttgatgggatttagtttgaacttgttgactctttgtgcattggttcttgccattgcgattgtggtcgatgatgccatagtggtcgtcgagggagtccatgctaagttggatcaaggatataagtcaccccgtaaagcatctatcgatgccatgcgcgagctttctggcgctatcatttcgattacgttggtgatgatgtcggtgtttattccggtaagtttcatgccgggaacttcgggaacattctatcggcagttcggtctcacgatggcatttgccattggtttctcggcgatcaacgcattgacgctgagtccggctttgtgtgctattttattgaaacctcacaataaagacggacatgaaaataaaaaaacatcgtttatcgatcgttttcatatagcgtttaatgcagcatacaacacgatgctctccaaatataaaaatggggttacccattttgtccatcataaaaaactttcgtttgcgggagttatcgtaggagttattgtcttggttattttaatgaacatcactcctacgggacttgtcccgaatgaagatacaggtacgataatgattacagccgatttgcagccgggaacttctcaggaacgtacggagaaaattcttatggaggtagatagtattatcgctactcatccggcagtaaaaagtcgtacacaaattttaggattcagttttatcggtggacaagggaatacctatggctcttttatcgtgaaattgaaagattgggacgaacgtaccggaaaaggtatggatgccaattctgtaatcgggactctttatatgaagttcgctacggaaataaaggatgcccgtgtattgtgttttgctccgcctatgattccggggtacagtatcagtaatggtttcgagttgaacttgcaggacaagaccggtggttcgctggatcatttttatgaagtcgctcaaaatttcttagctgagctgatgaagcgaccggagatagcgatggcctcgacgacatttaatccttcgttcccgcagtatatggtcgatgtcgatgtcgccaaatgtaaacaggccggtattagcccgagcgatgtgctggcggctctacaaggttatttgggaggtatgtactcttctaactttaaccgtttcggtaaattgtaccgtgtcatgatacaagcagaaccgagtgctcgggccaatcccgaaagtctgaacaacataaaaattcgtaatggttcagagatggctccgattaccaatttcattaccttgaaaaaggtatatggtcccgataatatcaagcgtttcaatatgtttacggctatgactattaacggtaatccggccgacggatatagttctggtgaagctattaaagctatcgaggaagtcgccgccgaaacattgccggtaggttatggatatgagttctcgggtatgacccgtgaagagcagggttcgagcagtggtacgacagctattatctttatgttgtgcttggtatttgtttacctgttgttaagtgctcaatacgaaagttacattttgccgctttcggtaatcctctcgataccgtttggattggccggtagctttatatttgcattgatgatgggagtcgagaataatatctatttgcaaatcgctttgattatgcttatcggtttgttggcgaagaatgcgattcttatcgtagagtttgcgttggatcgtcgtcgtacgggtatgcctattatcaatgcggccatcgatggagcggcagcccgtctgcgtcctatcttgatgacgtcattggcgatggttatcggtttgttgcctatgatgtttgccagtggagtaggtgctaacggtaacggcactctgggagccggagccgtgggaggtatgctcatcggtatgatatgtcagatatttattgttccggctttgttcgttgtcttccagattattcaagaaaagattaaacctcttaaatggaacgatcttgataattcggaggttatttcggagattgaacaatattccaaataaatttgaggtaactctataaaacagagaatatatgaaacgaattcttttatataccgtgtgtggtttagctatgctcactatgtttaatagctgccacatatataataaatatcatcgacccgatgtcgatgtagaaggcttgttccgagatactgtcgcggcaggcgatacccttgcggcagattccttgaatatggggaatttgccgtgggaagaagtctttaccgacacgatattgcagaatctcatacgcattggattagaaaaaaatagcgatctgcaaagtgccatgttgcaagtagaagcggctcaggctagtttcaatgccgctcgcttggcgtttttgccaacgttgaatttgactccgcaaggcggtgtaagtagtttcgatggtagcaaagcctcatggacttacaatgcgccggttacggcaagttgggagatcgatatatttggaagagtgctgaattcaaaacgcaatgcaaaagctgtattaatgcaaagcgaagcgtatgaacaagcggttcgtacacagattatcgctaccatagctaatggttattacaccttgttgatgctcgataagcaactcgctgttacggaagagaccgctttgttgtgggaaaagagcgtggagacgataaaagcgatgaagattggaggcatgacaaatgaagctgcggtagcgcaaagtgaagcgaatagctatatgattgcggcttcgataccggctttgcggcaacagataagagaagcggaaaacagtttgtccacattgctttatcaagcgccccaatcgatcgagagaggaacgtttgaagaccagaaactccccgaaatgttacaagtgggagtcccggttcaattactttccaatcgtcccgatgtacggtcggcagagctctcgttggctgcggcatattatactacgaatatagcgcggtctgccttttatcccaacttggtaatttcgggatctgccggatggaccaactctgccgggagcatgatcgttaatcccggaaaagtgttgctgtctgcggctgcatcgttggtacaaccgatattcaatcatggcagtaatgtcgcgaatctgaaagctgccaaagctcagcagaagatggctgctattaatttccaacagacaatccttaatgcaggaaaagaggtaagcaatgctctttatcaaattcaaacgacaaaggaaactcttgtaaatagaaatcggcaggttgcttctttggaaagagctgttgaagctaccgagtcgttgatgaagctgggtacttcgacctatctcgaagtccttacggctcaacagtcgttgttgaatgcccagttgtcccagatttccgattcgtatcaatgcatggtcgctgtcgtcagtttgtatcatgccttaggcggaggacgggaaatagaggaaaatacgaagtaaaaattaaaaataatatactatgattagtccgttagcgtacgtcgattccaaagcggtgattgggaacaatgtgacgattcacccctttgcttatatcgataaagatgttgtcattggagacaattgtgtgatatatccatacgccagtgttttggcgggaactgtcatgggaaaaaacaatcgggtttttcaaggtgctattttgggcgccgagccgcaggatttccattataaaggcgatgctacccggttgtctatcggggacgataatatgattcgagaatatgttatcatcaatagagctacgactcccgaaggagaaactgtcattggaaatagaatttgtctgttgaaaggaacacgtatcggacacgactgccgtgtggacgacgattgcattttaggtatcgattgcgacctctcgggagagtgtcatattcatagtaaagcaattctcgccggacgtgtaatcgtgaaagagcgctgtcgggtaggtagctggactttggtgaaaagcggttgccgtacgggtaaagatatacctccgtatattttagctgcacataatcccattacatataagggaataaatgcatttattcttagacggcgaggattcagtgaggctactatcgagaatatcgctttggcttatcgacagatatatcagtcgggtactagtcttgaaaatgcagtgcttcgtattaaagaagtggtggagccaagtcccgaaattgattatattctatcttttatagaagattcgaaaatgggtataattgctacctatggagaagaaaaataaagtagaaaagtagactgaaagaaaccccggttatttttaaccggggtttctttttataaatgcctattctctttttttttattttaaatatataaatatttgattattatataattatgtgctttctggatcgcctaagtctaatagtgtttgtttttattaacgaaatagcacataattaagcggtgaaaactattttggtttccaaagttttctatacatttgccgcaataatgggataattattatgaatacagagttacaacaacgaattatcaagcaggcaacccgtatgtttttgtgtaacggaattaaatctgttacaatggatatgattgcgtctcaattaggtatctcgaaacggactctttatgaaaacttcaaggaaaagaacgagttattattggcttgtttggaaagtcaggaaatggaaagaagggctcggttggaggtatattttgccaatcgaaagaatgtgattgatttgttgttgaatgtttatgaagatatcctccgtttcatgcggaatacaagccccatgttttttgtggatatggaacgatattatccgagagttaatgataagtatgagaatgataaggaatgccataaacaagctacggtcgatttattgaaagaaggtgtcggtgaaggtgtgatacgagccgatatcaatatggagattgtagcgacgctattgacttttcaatttgaacttttaaaaaaatcagatcaaatatttaattctaaatatacttttaccgagatttttgaaacgatatttaaaagctttattcgaggaatagctactccggagggagtaaaatatacagatgaattttttgaggagaatagataaaaagatggtaaaaactttaatgatgaaaaaaaacgtatgaacaaaatgacgatcatgcaccgagtcggtgctatgttgatgctgttccttttccccggaatatcttgggctcaggaacagaaagttcaatcggtaactctcgatttgaaaacagctatcggtatagcgctcaatgagaatccaacgattaaggttgccgatgtggagatagagaaaaaagattattccaaaaaggaaactatcgcaggattattccctcgtatagacggttctgcatcatatagtcgtacgatagagaaacaaaccatgtatatggattcagaagcattcgatatgagtgccatgtttactcctatatacaatacgataagtcagcttcaccccgagtttcaggttccgcagacaggaggagcttcctcttcttccggtgaaacaggaatgaaagtcgggacagataatacttattcggtagggtttagtgcttcgttaccaattatcgcccctcaattgtggaaaagcgttcaattgtcgagtgccgatgtcgaacaagcggtagaagcagcccgttcctctcggttgagtttggttaatcaagtagagaaagcatattatagtctgttgttggcgcaaaactcctatgaagttatcaaaatgagttatgacaatgccaagttaaatgcaagggattacaaaaataagtttgaacagggaacggcttcggagtacgatgtgttaagggccgaggtgcaagtccgtaatcttgaacctacattattgcaaaccgagaacagtgtcaaattgagtaaacttcaattgaaggttctgatgggtatggatatgacggttgatatagaagttaccgacaaattagacgattatgaggcatccatgtatgaggagactttgaatatcaatacctcgcttgaacaaaataccgatttgcgtaaattggatttacaaacggcctatttgaaaaaggcagtcgatgtacagcgcatggcttggtttcctacattgtcggcgacagctaattacaactggatatcgatgagttatggcggtatgtttgacgatttccgatggaatccttattctacggtcggactttctttatcgctgccgatttttcaaggaggggctcgtcactttaaaataaaacaagctaaatcgaatgtcttgcagttgggactacaacgagataacttggtaaactctctttcgatgcaagtgcaaatgtcgatggataatatccagaaatctataaaacagattgcttccaataaggaaggtgttcgacaagccgagaaagcatattccatcatgcaaaaaagtttcgagattggttccgctacttttgtagagcttaacgatgccgatttggctttgacgaactctcgtctctcgtataatcaagccatatacgatttcttagcggcaaagtccgatttacaattgctgttgggtaataccgatttggaacaatataaacaagagaaaagccaagataagtaatacattcatagaataatataagaaaataaacatatgaaaagaaatcattttttcaacgtaatggctgtttgtgcggccttgtcgttcgtcgcttgttctggacagaaggagactagcgaacaagttgaggaagaaactgttcaacttgtgaaaattgctaaggttatggagcaggctgttccgcaggtcgtttcatatacagctacggtagaaccctataagcgtaattcgattagttcgtctgtccccaatcgtatcaaaaaaatatatgtagaagtcggtgataaagtctatgccggacaaaaattggtagatttggatcaagccaatttagctcagcagaagttacagttggacaatttggagttggagtataaccgtgtaaaggagctttttgccgtaggcggtgcttctcagcagcaagtagatcagttgcgtacgcaatatgagacgaccaagaccgcttatggaaatttagatgaaaatacggttttggttagtcctgtaaacggagtggtgactgctcgtaattttgataatggcgatatggccagtggggctattttaacggtgatgcagatacagcctgtaaaagtattggtcaatgtatcggagagtgatttcacgaaagtcaaaataggtatgtcggtcgatgtaaatgtcgaggtatatggcgatgaagttttcaaaggaaaagtatcgttgatacatcctacgatagatcctgctacccgcacatttgtgaccgagatcaatatacccaataccgatagtcgcattcgtccgggaatgtttgcccgcgtaaatattgatttcgggaatgtcaatcgtgtcgtagtacccgatcaggctgttgtaaaacgttcgggttctggggacagattcgtttacgtgtataaagatggaaaggtttcctttaatcaagttcagttagggcgtcatatagacaaaacttatgaattgatttctggtgtagagaatggagccgaagttgtgatcgccggtcaatccagattgaaagatggagcctctgtgaaaattgcagagtgattttaagatacctaattaaactattcacacattaaagaaaaattatatgagtctatatgaaggttcggtaaagaagccaattatgacgtcattgtgctttgtcgcagtggctatcttgggtatcttttcccttacaaagctgcctattgacctctatcccgatattgagaccaatacgattatggtcatgacagcgtatcccggagccagtgctgccgatatagagaataaccttactcgtccgttggagaatgcgctgaatgcggtgagcgatttgaagcacattacttcggagtcgaaagaaaatatatcgttgattacccttgaatttgagttcggtgaagatatagatgtactgacgaacgatgtgcgtgataaattggatatggtaaaatcggagctgcccgatgaggcggaaaatcccattattttcaaatttagttccgatatgattcccattgtgctgctttctgttcaggcgaatgaaagtatgccggcactgtataaaatcctcgatgataacgtcgccagtcctttggcgcgtatcagtggagtcggttctgtctctatcagcggtgctcccgaaagagaaatacaagtctatgtggatccggtcaaactcgaagcctataatctcagtatcgaagctatttcgtcggttattggcgctgaaaacaggaatataccaggaggtacgtttgatgtcggttcggaaacttattcattgcgtgtgcaaggggagtttagcgacgccacgcaaatgaacgatatcgtagtcggtaatttcggtggaaagacaatctatttaagagatgtcgccgtcgtacacgattcagtcgaagagcgggcgcaagaaacctataacaatggagtacaaggggcgatgattatcgtccagaaacagtcgggggcgaactctgtggaaatctccgatgctgttatggaagcactgcctagattacagaaaaatttgccgagcgatgttaaattgggtgtgattgtcgatacttcggataatattcggaacacgattgatacgttgttcgaaaccgttattttggcattactctttgtgtcgattgtggtattcctgtttttgggtcggtggagagctactgttatcatcgtcattaccatacctatatctttggtcgcatcgttcatttatttggcggctacgggaaattcgttgaatatcatctctctttcttctctttcgatcgctatcggtatggtggtcgatgatgctattgtggtacttgaaaatgtgacgaatcatatcgagcggggaagtgagccgatgcaggccgccgttcatggaacgaatgaagtgggactttctgtggtggcatctacgttgacgcttatcgccgtgttcttcccgttgacattggtgacaggtatgaccggagttctttttcaacaattaggttggatggtaaccattattatggttatttctatcgtgtgcgctttggccttgactcccatgctttgttctcgtatgttgaagttgcaaccgaaacaatctaaggctttcaagatactttacggtcccattgagagaggattggacagtttcgacaatgcctatgcacgtttgttgcattgggctgtaggacaccgcacgatagttattgtttcgtgtatgtctttctttgttctcagtttattcttggttcggttcgtgggaacggagtttatgcctactcaggataatgggcgtataggggtaatcgtggaattacctattggaacgcgtactgaaatttccaaagagataggtatgcggttgtataatcaatggatggaacaatatcccgaaattgaagtttgtaactttacggcaggacaagccagtacagacaatacctatgcttcgatgaccgataacggttctcatattttgacctttaatatcagtttgagtgatccgggagaacggaagagaacactgtcggagatttgtgatttgatgcgtaaagatttggcgggatatcccgaaattaagaaatcgcaagtgaatttaggtggtggtatgtcggctatgggtggtgagaccatgcttgattacgaaatctatggttattcgttcgaagagaccgatagtgtagcggctcagctctctgctttactccgggatataaagggtgttagcgaggttcgtattagtcgtgccgattatcaacctgagtatcaagtagatttcgaccgggagaaattggctcttaatggtcttaacttggcgacagctgctacttatttaagaaatcgtattaatggagctacggcttcccagttccgtgaggaaggggaggaatatgatattaaagtaatgtatgctcccgaatatcgtacatcgatagaagacatagaaaatattgtcgtttataatgctcagggaaaaggcgttcgtgtgaaagaattagggaccgttgtagagcggtttgctccgccgacgattgaccgtaaagaccgtgagcgtatcaatacggtttcggctattctttcgggagctgcgatgagcgaagttgttgctgcggctcaggaaaaaatagaccaaatgtcgcttccttcgggtatcagtatacaattgtccggtacttatgaggatcaacaggattcttttggcgacttatttactttgatgtatctcatcgtgattttggtgttcattgtaatggctgcccaattcgagtcattgacctatccgtttatcattatgttctcgttgccctttgcattctctggtgtattcttggccctgtggttatcgggcaatacgttgaatgtgatgtcgttgatcggtgcgataatgcttattggtattgtggtgaaaaatggtatcgtgcttatcgactatatatcgttgaaccgggaaagaggtatgggaatacgtgaagccgttgtaacaggtggacattctcgtttgcgtcctgtaatcatgacgactttaactacgattttaggtatggttcctatggctatcggtacggggcaaggttctgaaatgtggaggccgatgggtacggctgtgatcggtggtttgacagtatctacgattttgacattgattctcatacctgtactttattgtgtatttgcctctgtcggtgtgaagcgcaaacgcaagaaacatcacgaacgactgcttcaagatgtaaagataaattctaataactaaatcaaaatgttctgttttccttttcccagaatcggaaaaggaaaacagaacactaaaaatataattcgatatgaaatctgttcttatcacttttgatcaagctcactatgtgcgaattatcgaactgttggataaactctcttgtcgggggttctcttatttcgaacagatgagaggacgtggttccaagacaggggaaccccactatggcagtcatgcatggccttccatgtgttctgccattataaccgttgtcgaggatagtaaagtagagccgctgttggaaaaactgcatcagatggacgaggctactcctcagcttgggctacgggcctttgtctggaatatagagcaagcaatttgacgggtttgtgtccgaacatcacacacccacccagaggctgcatcgaatatttcggtgcagcctctgggtgtattaggccgtgaggatatctcaacgatttgtcgaaaggggataatttgtagtccgattgtcttcatatttcggtaaaatcattatttttgtattgcataaaattgtgtactatgaaacattcaagcatttggagctgcctcatgattttttcagtagttggtatctccttattgacatcgtgtgggagaagtggaaaagtggaaatcactccctatattctcaacttgcatttgaaatatacgcacattgataatttcgagcacggtatagctcgggtgagcatggatactaagactgagtcgggtcgcgagacagctgtctatggttgtattgacgagaggggcaaggaggtgataccttgtatttatgagctggtatttgtcgagcctggtggtatcgtggctctttcgaaagagggggtgtacaaactttttgtctatcgcgacggtggggtagaggaattctccctcccgtcaggtattcagccgataagcggtttctgttgcgaccgtagtgcggtttgtgacgagtattataactatggttatatcgattccgaggggaaccttgtggtgccctgccggtatgaacgtgtgaatgattataacgaaggtttggccgtagtcgaacagaattggagaaaaggatatgtcgataccgacggttacgaggtgtctcctgtctcttatcggggagcagaaatgtttagaaatggccgcggctgcgtgcagaacgaggcaggactctatggctacgtcgacgagacgggccgagaggtaattccctgtcggttcgaaaaagccatctccttttatggcgaggtgaccccggcgtgtctcaatggtctctatggtttgatcgacaaagacggcgagtttatctcgaccccgcgttatgaggcgatgggtatttgtgacgttgatgtgttttatttctatgagaacggtctctatggctttgtcgatgccgagcagaaagaactgacttcggcacgttacgaccggataggtgaattattcagcgaggggctgattgatgtggaacagcagggtaaacatggattcataaataagcagggcgaagaggtgataccctgcatatacagtcgggtgagccggtttgaaaatggctttgcccgggtggctcgcaatgggagggtagggtatatcgataccgcgggacgcgaagtctttttgctcccctctaacagctatgcgagcacttatcgctcgggctacggtgtgttctgttttaaaagcggtggtgagatattcatctttgacgaggagggtaacaggctcgacagtaacggtcgggagactccgggtaccatctctgctggtagtgagacacccgccagtggtaacgtgggtagtgacgtggtgtctattcccgcagtttcggcacccgtttcgtcgggtagcaaccggagcgatccagcccgtcgggtcgagtgggaaatccgccgcagccgggccattgaagagctgacccgcttacagatgaaattgatcgaggaccccaattcggctgctatcaagcacaacatacagtcgcagcagaacatcatcaatacttgtaacgagatgatcgctatctatcagtaacagggtggacatttcctgtttcgtgaggggctgttgtttcttcgtgcgaattggactatctttaccgagtcttaaatagatctgttatgaaaattcttctcgacgtacatactcacacggttgctagcggacatgctttcagtactttacaggagatggttcgcacggcagccgataaaggcctgcaaatattgggtattacggaacacacgggtggcattccgggaacttgttcacccatatattttcggaatttaccggtagtgccgcggctgatgtacggggtggaactcttattaggcgccgagataaatatagtcgattatgaaggttctctcgacttggaagaagaatattttaaatttttggatattcgcatagccggacttcattcgctgtgttatcggccgggaacggtcgagcagaatacattggctgtggaaggtgctatacgtaatggtcatatcgacattatcagtcaccctggtgacggtacggccgatctgttttttgaaccgttagtgctggctgccaaagagaacggggtgttgttggaaataaacaacagttctctcaatccatatcgccataaggagaaagcgagagaaaataatttggaaatcctgcgtttgtgcaaacactatgagcaacctgtcattttggggagtgatgcccatatctctttttccatcgccgattacagatggctgtatcctctgttggtggagactgagtttcccgaagagcttattctcaatgataagcccgatgtgttcaaagctcgattgagacgcaaccgggaggaaatggtcgtttagaatttcgtcattccgtatttatcgaatgttttcttacgggaaatccatagggtgagcaaaaccgatatgagcgaagaggcgaagatggttatcattagcatgatttgatatttgatggctacgcttgggctgctgcctcctaaaatttgtccggtcatagttcccggaagggcgataagtcccatgactgccattgatgcgatcgtggggttgaacgatttgatgagggcttcacgcatgaagggggtcagggcttcgctgggagatgcgccgttccccaacagataaaggtataattgtcgttctctgtttagagagccgtaaaacgaattgagagcgataacgttggccgatagcatattgcctaaaatcataccactgatgggaataaaatatcgggcggtaaagattttttccgggcgaacgactaagcctaagaaataaaagtctatgacgagtagtgagacgagaaatgcaacggaaacagccatgaataaagttcgtacgggtaagtgggttcgttttagtgcggtcgatgaagctatgattatcatgagcaatatccataacagatttatccacagtttatcccataaaaacaggtattcgagataaaatccgatgaggaagagttgtacggtcatacgtagcgcggcaataagcgtgtcttttaccaaaccggtacggtaacggtagagaaaataggtagggattatcaataacagaaatcccaaagccatgtgtccgtatccgatatttattgtttccataatcaatctccgatgtatatttttcggtcgaacgcctctatgaagcgagtgtcgtgcgacaccatcactacggttgtttcccgcatggcgtgaatgtaatcgatgataagagaaatagagtcgggatcgagagccgaggtaggttcgtccaagagaacgatttttttgtttaacaaagccgttatcatcagcataatacgctggcgctgtcctcccgatatttcaatagagcgtttttcatacagttcgggttccagtccgagtcttgcgaaatgattcaggacagtttctttcgtaggtctcgacggttggtttatttttagcctgaaaggggctgcgatcagttcttcgactgtttcaaacgggagagtgaactcttggggcaaccatgcggttatccgtcgtatttgttgtatggcaacgctgtcgaggattttaccgtttatacggatagagccttcgtctggtaaaacaaagccggctaccgaagcaagaagggtgcttttaccgtgtcccgaaggtccgtaaagcaccactttctcgccggagctgatgcaacacgagaagtgttgcatcagaggcttgttgtcataaatgaaagttatgttgttgaattcgatcatttttgttggtcggtagttgtagcttgcggcttcaaccaacggtcgagccaacggaagaaaattctttgccacagtacaccgttctgaggcttcaaaatccagtggttttcgtcggggaagatgagcatttctgccggaactcctcggagtttggctgcgttgaacgccgacataccttgtgaggcaagaatgcggaaatcatattctccgtgagtgataagtatgggggtatcccattggtctacgaatttatgcggcgatgtagcgaacgtacgttgtgccgtggcattctttttatcccacggagctccgcccatatcccagttggcaaaccacatttcttcggtttctacatattgttgttcgaggttatagatacctgcgtgggcgataaatgctttgaatcgtttttggtgatgtccggccagccaatagaccgagaatcctccgtagctggcgccaactgcgcccatgtggtcgccgtcgatgaacggttcttttttcatttcatcggtcgcactgaaatagtctttcatgttttggccaccgtagtctccgctgatttgttcgagccattcttgaccgaatccatagagaccccgacggttgggtgcgataacgatgtatccgttggcagccattaattgcagattccaacggtaagaccagaattggctcaccggttgttgaggtccgccttgacaatagaggatagcggggtattttttagaaggatcgaaatggggaggataaacgatccacgtaagcatctttttgttatctgtcgtctttatccagcgttcttcgactttacccatagtgatttgatccagaatatctttattctcgaaagagatttcctttacttctttgctttgcgggtcaatactataaatttcatcgggctgagacagagagtggcgcatggcgatcaaacagttgtcgtttacgggagccaatgaggcataatcgtaatatccggtcgtgatttgttcgatttttttatcgagccctactttgaaaatgtgtatttctccctgataggccgaacggatatatagagattttccgtcgggactccaagccaattcatcggtgctgtaatcgaagtcggaggtcaggtcttgtttttctcctgtttccatgttcatgatgaagagtcgatttttgtccgattcgtaaccctcgcgttccatgctgccccatgccagatatttcccatcgggcgagaacgccggtgtagtatcgtatcccatcatgccctcggtaaggtttttggtttcttgggtggagaggtcatacagataaatatctgaatttgtcgataaagaatattccataccggttttctttcggctggtataagcgacggctttactgtcgggagtccatgcgaaagattcgataccaccgaatggcttcatgggagattcgtatggctctccttccataatgtcggtaatatcggttaactgtttaccgtcgaatgaagcgatataagggtggggtatctcttccacccactcgtcccaatgcttgtacattaaatcgtcgatcacacgtcctgtcgccttatcgaggtcgggatagaggtccgaggctttctcgctgtatttcacgttgccgatgaaaagtatatgtttttcgtcgggcgagaataaaaaaccgtggacacctttctcatggtagcttatttgtcgggcattgctaccgtcggcattcataatccataattgtgaatctccgctctttcccgacaggtatgctatttgtttgcctccgtcgatccatacggcattaccttccgattcgggagtacaagtgatttgctttttgttttgtccgtcgatgtccatgacgaagagctcacggttgcttttgttttgttccagattttcgtaagagacaccatacaaaattttactcttgtcaggagaaactacgggaccgcttactctgccgaatgccatgagcacttctgtggtcatgattccattctcgacttttacgggttgtttgccgattacgtctccggtttttccggtcggctgacaggccgttaccaataaagttcctgccatcatcatacaatttagtttgttcataaataacggtttatagtttatttattgttcggttttttctttttttgtctactctttgtctcacctacgattcttgccggttttctccacggggtgttcccatatagtttttccgccaaatcgtttctgtgcatgcgtttgagtgaattttgtatgtcgtttctcttttcggggagataccagaagaaatatttacgttggtttaacttctcttctggttttcgggctgtgaaaactttctcaccggtgtaggggtgtattcctgtataataaatttcggtggacagagtcataggagtaggcgtaaaatcctgtacttgttccaatttgaaattcatttgttttgtcaaagccgccaattctgccatatcttcctctgtacagcccgggtggctcgatatgaaataagggataatttgctggttcagacctttctccttgtttattcgttcgaaaattcgtttgaattcttcgaagagagagaacgaaggtttgcgcatgatgttgagaactcggtccgaagtgtgctccggggctactttcagtcgaccggagacgtgacgggatatgagttcctctgtataaaaccgagtacaatggtttaactcattatctttgtggcggtggagcaaaaggtcgtaccgtactccgctgccgataaacgatttttttatgccgggtagggcatcgacggcttggtatatatccaataaagacgaatggtcggcattgagattcgggcagatttgaggagccaagcaggaaggccgtttacactttcggcaaagttcttcatttgccccgtgcattcggtacatgtttgccgaggggcctcccaaatcgctcagatatcctttgaagtcgggcatatcgatgatttgttttacctctttgagaatggactctttggagcgggaggcaatgaatttgccttgatgtgccgaaatggtgcagaatgcacatccgccgaagcaccctctatgcagattgaccgagaattttatcatttcgtatgccggaattgtttttcctctgtatttggggtggggcatacgggtataaggaaggtcgaacgaggcatctatttccgtttcggtcatgggcgggtaaggaggattgaccataattgctcgctctcccacgctttgccaaagtcgcttagcgtggtatttattggattcttcctcgatgtgcttgaaattttccgattgcttccgtttgtggagtaggcattcttcgtgtgatgcgaggacgatattcccttcgtcttccgtaatgcaaggcatattcgaaagaggttgcatgcttgctgtttgtggaatgtcgtcgagctgttttatgttctcaccctgttgtaaccggcgggctatttctacgatgggacgttcccccattccgtaaattaacaaatcggccgggcagtcagccagaatgccgggcaatagtttgtcttgccagtagtcgtagtgagtcaggcgtcgcatagaggcttcgattccccccacgataatcggagtatccgggaataactgttttaagatacggctgtaaacgattgtaggatagtcgggtctcatgccatgccggccattgggagtataagcatcgtcgctcctcaatctcttgtttgcggtataatggttcaccatcgagtccatagctcccgccgaaataccgaagaataaccgggggatacccaattttttgaaatcccgcaaatcgtcttgccagttaggttggggaacgatagccactctcaatccttcggcttcgagcgtgcgtccgatcacggcagcgccgaaagaggggtggtccacataagcgtctcccgagaataggattacatcgacgtaatcccagcctcgtaaatccatctccttacgggtggtcggtaaccaatcttgtaatcggtattctttcattttcttgttaatagagcccttcgatctttccgtttactacttttatttgatgtgcttgcgggtgcttggggagccccggcatgcgtagcatctctccggctatggctacgataaagccagcacctgcatttaattctatgtcgttgatggtaaattgaaaatctttaaccaacccgtatcgtttcggatcggctgaaaatgaatattgggttttggcgatacaaaccggtaaatgatttaggttccagttcttaatttgtttcagcttcttctcggctttttgactgaatacgacctctcccgcaccgtagataatgtgtgcgatcttttctatttttacagctggggaatcgttatcgtcataggtgaaacgtaacggacgagacggattgttttctatctcttcgacaacggcgtttgccaaatcggcggccccgataccgccgtcggtgtaagcattgttcacgacgcatcttatacctttttgttcgcaatggtgcatgatgagttctatttcttcatcagtatcgctggtgaaacggttgagagccaccaatacagtttgtccgaaagattgcaggttttcgatgtgtttgtcgaggttggcgaatccttgaatgataccttctctgttcggtttcgttatgtctgcttcgggaacgcctccgtgcatttttagcgataatgtggtcgctacgaggactgtcaaatcgggacgaagtccgctttgacggcatttgatattgaagaatttttcggcccccaagtcggctccgaagcccgcttcggttacgacatagtctccgaaagtaagagccatgcgggtggctatggccgaattgcagccgtgagcaatgttggcgaacggccctccgtgtacgagtacgggattatgttcggtcgtttgtaccaaattaggttctatcgcgtcgcgtaacagggcgagcacagggcctgtgatacccaaatcgtttaccgtgaacggctctccattataccgatgtgcaacgacgatacggccgatgcgttgttccatgtcctccatatctttcgagagacaaagaatcgccatgatttccgatgcaggagtaatgtcgaatcctgcttccgtgggaatcccgttgttgagtccccccaatccggtcacaatctgccttagtgatcggtcgttcatgtccattacccgcctccaaagtatatttttcagtccactgccctcggctcggttctggaaaatatagttgtccaactgtgcggcgattaagttgtgagccgacgtaatggcatggaaatctccggtgaagtgcagattgattctttcgggaggtagtacttgtgcgtacccgccgccggtagctccgcccttaatcccgaagcatggacccagcgaaggctctcgtaaagcgatgatggctttcttaccgatatggttgagtcccatgcccaatcctatgctcacggtcgtttttcccacaccggctttggttgcggtaatggcagttaccaatatgaggtggctctttttcgctttatggtcgttgataagtttgagcggtactttggctatataaggaccgtagtggaataagttttcggcaggaatacccgctttgcgggctatggtatctattccttctaagacagtgctgtcggctatttcagtgtcacttttcataaattcaggtagtcgtggttgttttttgatataaatcttctagttttataagctcgtcccgatattgtgccgcttcgatgaaatccattttttttgccgcttcgaccatctgtttgcgagtacgttcgatggccttttgcaactgttctttcgacatatatttgacgataggatcggcggcgacatctacatgttcccgatattcatcgctgtacgcttttgtcggtttggtcgctttggacggttgcgcctgttgttttgtatctgcattcgatacgagcaccgagctcttcgacttttgtatcgcttggggagtgatatggttttcttcgttgtaagccaactgtttctctctccttctattggtctcgtctatggttttttgcatgctttcggtgattcggtcggcatacatgattactcgcccattgaggtttcttgcggctcgtcctacggtttgtgtcagcgaacgatgtgagcggaggaagccctctttatcggcatcgagtatggccactaacgagacttcgggtaaatccaatccttcgcgtaagaggttaaccccgataagcacgtcgtaaacacccgctcgtaaatcgtccaaaattttaatacgatcgagagtgtcgacatcggagtgtatataattacagttgatgtcgagcttggcgagataagcgttcagctcctcggccatacgtttggttagggtcgttaccagaactcgttcgtcgcgttctatccttagttgtatctcttctaataagtcgtcgatttggttcaggctgggacgtacctctatgatagggtcgagcaatcccgtcggacggataacttgttcgacgacgataccttcgctcttttccaattcataatcggcgggagtggcgcttacataaatgatttgccgagccaatccttcgaattcgtcgaatttcaaaggccggttgtctacggcggcaggcagtcggaatccatattctaccaaattcattttgcgggatcggtcgcctccgtacatcgctcggatttgcggtacggtcacatggctctcgtcgataatcgtcaggaagtctttgggaaaataatcgagcagacagaaaggtctggttcccgcttctcggccgtcgaaatatcgggaatagttttctatccccgagcagtggcctatttcccgaatcatctccacatcgtaggtcacccgttcgtaaagccgtttggcttctaagttttttccgatagatttgaaaaattctacttgtttgccgaggtcgatttctatctctccgatagctttgtctattcgctctttggtcgtgacgaataggttagccggaaaaattttgtaagcatcgaatgtccccgtgctgtttcccgtcgcagggtctatggtacgtatcgactcgatttcttcgccccagaactcgatacggacaatcacgtcgtcataggcgagataaatgtctaccgtgtcgcccttcactctgaaattaccccggttcagttctatctcgttacgggagtacagcgaatcgacgaagtgtcgcaatagtcggttccttccgatattgtcgccaacctttatgtcgatgacattgctgtgaaagtcctcgggattccctataccgtataggcatgaaaccgaagataccacgataacgtccttacgacccgaaagaagggccgatgtggtggatagacgcaaccggtctatctcttcgttgatggctaagtccttttcgatataagtgtcggtcgagggtatataagcctccggttgataataatcgtaatatgaaacgaaatattctactgcattttcggggaaaaaacttttgaactcattatataattgtgcggccagagttttgttgtggcttaaaatgagagtcggcttctggacccgctcgattacattcgccatagtgaatgtttttcctgacccggttacacccaatagagtctgatagggagtcccgtcgagtattccccgacttaactcgtcgatagcctccggttggtcccctgtcggacgataaggtgaaatgagtttaaagtccattgaaatcgattctttaataagattccgggattacaaaacaaaggactaaataaaccagcagggcgaggcctattgtcccgatagataacagtacgcagatgatacggaccacggtagggtctatacctaaatattcacctatacctgcgcatacgccgcctaacatgcggccgttgcggggacgggtaagtttctttatcgtattcattttatgtttgataatttttcagatacaaagatagtgaaaggtgagagcagagacaaacggaaatcacatttccgatagggctatgccgaaccgcatcctattttcgctattgtgcaaagatagtgaaaggtgagcgtagaggcaaacggaaatcatattttcgacttggttatgccaagcctcctcctattttgtatttcctttcgaagataataagacaaaacgtacctgtctgtttttcataaaggccggtatgaaaatatgaaagataatatatttgctgatactgacaaaaaaagttggtcgatataaactttattattaccgataaataaggagtctttatcccggtcatcgttaaatttctcttatttcctttctatattcgtgtgaaatctctaactttgcaaactgataaataaattaataatgagaaaagtaatctgttcgatagtttgtgctttgctccttgtgtcgtgcggcgaatataataagatgctgaaaagtactgattatgagctgaaatacgactatgctaagaaggcgtttgaacggaaaaaatatatgcaggctgcgaccttgctcgaagagttggttgcaattttcaaaggaacggatagggcggaagagtcgttgtatttattggctcggagctattatttgaataaggattatattacgtctggcgaatattttcaggcgtattataaaaattatcccaaaggagaatataccgaattggcccgtttttattgcggatatggttattatttggactctcccgaggctaaattggatcaaacaggcacttatagagcaatcgatgaaatgcagcgtttcctcgattatttcccgaatagcgaacgggctaaacaggcacaggatattatttttgagttacaagacaaacttgtgtataaagagctattgaatgcccagttatattataatttgggtaattatatggggaataattatcaatcggctatcattacggcgcaaaacgctttgaaagaatatccctatacgcgatataaggaaactttgtccatgttgattttgaagtcgaaatatcaagaagcggtacagagtatcgaagaaaagaaacctgagcgttttcgcgatgtcatcgacgaatactattcgtttatcaacgattatccttcgggagaatattcgaaagaagccgagaatatatttaaagtggcgaataaatacgtaaaagattaatctttaaaataatggattacaagaaaacaaatgcaccgacaaacaccgtaacacgcgatatggtggcgttgtcttccgacacgggaaacatttatgaaacggtttgtattattgccaagagagccaatcaaattgcagtcgagatgaagaccgatcttgaaaagaaacttcaagaattcgcttcttgcaacgataatttggaggaggtttttgaaaatcgggaacaaattgagatctctcgttattatgagaaattgccgaaaccggttctcattgctacgcaagaatatatagagggtaaagtatattataaaaatcccgagaaagaaaaatcggctattgaataatagtctgtaaagtatacctgcaagccgcactattctgtatgatgatggtgcggcttgcagatttctttgtctgtcggtacaatcgttttatttgtttgttaccgagaaaagtaaaaagctcaattagttcattaaaactatgattaatagaatattaatccgttccaaagtcgttcaaatagcctattcgtatttcctgacgaaagacaagactgttatggaagctgagaaagaattgtttttcagtttcgaaaaatcttacgagttgtatcatttattattgactttgatggtcgaattgaccgatacgcaagctgcaagggtggaagctgctcgtatgaaattcttggcgactcccgaggagaagaatcccaatatgcgcttcgttaataaccggtttatcgagcagttgaggaattgcgacgattataaagattaccacgagaagaaacctgtgacttggaccaatgaaccgaagttcctgagagacttttcggagcgtatcgtaaagagtgaattgtataaagagtatatggattcttcggacgattcttatgaaaacgattgtgagttctggaaaaaagcccttagggctttgatctgcaccgacgaggagttgacggaattgttagagcaaaagtctttatattggaatgacgatttggagattataacgacattcgttttaaaaacgatcaaacaatttagtgaagaaaacggaggcccgcaatcgttattaccgatgtttaaagatgacgacgatgctgaatttgccaaagagttgttcaggaatacattgattcatgggggagaatatcgcaattatatagaaaatttcatcaaaaattgggagatcgagcgtgtcgctttcatggatattgtgattatgatggtggctttgagcgagtttcatagattcccttcgataccgacaagagtgactttgaacgaatatatcgagttggcaaaggcttatagtacatcgaagagcgggcagttcgtaaacggagtattgaatgcgatagccgataaccttaaaaaagaaggtgttctaacaaaagaataatgaaatttgttatatatttgtgcacgggttttaggatccaagtataaattttttattaaaagctaaattatgacagtgttatcaatttttttacaagctgcaacggggagtggaatgtcgagcattctgatgatggttgcattgatcgctattttttattttttcatgattcgtcctcagacgaagcgtcagaaagaaattcgcaagttccgtgagtctctcaccactggtgacaaaattgttacggcaggaggtctattcggaaaaataaaagaggttaaatccgattcttttattatcgaaatagccgagaatactcgtgttcgtattgccaaagattctgtttatccttctgctgccgaagctaaggatagcggagccgatcaagctaagtaatctattttttcaaaggactcctttgcaggagaataagaagataaggttttttatcaaggaacatcggttctgtcgataaaaaaccttatctttgttgtatgtagtcgttgcatgatatatggaagagaatatttcagaccgcatagtagcaaagtttaagtcgattatccagaggattggtactgcattccgtcaggaacgcacgcgggaattgtttacatttttggggtttgttctcctttcgttgatattctggtttatgcaagggctgaatgaggaggttgaaaattctttcaaaataccgatagaactacaaaaccttcccgagaaaacgactcttattaatgatctcccgtctcatatcgaggtgagagtacgggataaaggtcctgttatgttggggtatgcgatagaaggattgtccccgttacggattaattttcaggagtatgataaggggagaaattcttttttgttgttgtcgtctcagcttgaaactatattgcgaaagtccctccgttcgtcaacgagtattgtttcgattattcccgatacgttgaaagtgatgtacacacacaatgccggtaaacgggtgaagctggttgtgaaaggtgtcgcatcgactacacctcagtgtgtactgagtggtgatatgacagccgatgtcgattcggtgatggtttatggagagtcttccttattaaaacgagttaaagaggtttatacgaccgattttgaagcaaaaaagttgaacgatacccttcgcacggttgtcaagatagcgaagattccgaatcttcgaattgttcctgaacaggtgaccgtcaccatacctgtggaagaaatgacctctaaaattctcgatatccctgtaatcccgcaaaatgtaccttcgaattggtctcttatcacatttccttcgtcggtgcaactttcttgcatgatgccgtttagtaagtttgcggcggtcgatgaagatagttttttattgggagtcgattttctggatttgtcgcggcggcgtctctctgataaattaggggtgaagatattgaatgcaccggaatatgtccgaaatatagtgttgtcgcaagacagtgtcgattatattttggagcagaaaagacctgcatttgtagttcctgtcgattctgccaatcgagtaacacccgattcgatatgagacgtataggtattaccggtggcataggtagtggcaagtcggttgtctctcggttgctgcgtataatgggatattctgtatatgatacagactcggaagcgaagaggctgatggaatcttcgttggaagtcgtgcagaaactatcggagtgctttgggagagatatatatcataacggtcgattgaaccggggtttgttgtcctctcgggtatttggaaagtcggataagatagtattgcttaattccatagtacatccggtggtacgcttcgatttctatcgatggtccgaatctctaaacgaggagatatgctttgtggaatcggctattttgtatgaatcccggtttgacgaactggtagatgaagtctggacggtgacagcaccggaagagttaagaataagtcgggttcgccagcgtagcggtttgaccgaggaagagataaaaaagcgtatggctgctcaattgtccgaggaagaaaaacagagaagagctgctcatattatttggaatgacggtaatgtatctgttatccatagggttttatctttattgaagtcattggaatgagaatttttcgttttgaagacggttaaaccggacaagaatattatttttgtggttcgaatgatttaagtaattaaatataaaacgaaaattttatgttaaaaacgattttatctatttccggtaaacccggtttgttcaaattgatatctcaggcaaaaaatatgctgatcgtggaatctctgcaaacggggaaacggcaacctgcttatgcccatgaaaaaatcatatcgttaggagatatcgctattttcaccgatgaagaagacgttcctttgagtgaagtattgaatgcgataaaagaaaaagaaaatggagcgaaagtaacattggatatcaagaaagccgataatgaaacattgcgtgcatatttggcggaagtgctgcctaatttcgaccgtgaacgtgtctatccgaccgatataaaaaaattgataagttggtataacttgttggtcgaaaccggtaacaccgattttgtggaagaagaaaaacctcaaaaagatgccgatgtcgagaacacggcagcaacggacgattctgtaaatgagaaagaggaaaagtccaagaccaaaaaggcaacaaagaaaaaagcagaataagaagccattctaatgaacggtaaatataagcctgtgcggtttcccgtacaggcttttttatggatcgagggtgtgtatccaagctccttgtgtgcgaatatcgtggcagggaatactattttcgaaacagtcgttttgtaatttagtggctcgtctggggtgaacatcgggaccgatgataaattgccgaacggaaaatagtttgagtatgtcttctattctgccgttgaacatcttgccgataataacatagtctatcgttagttttttccctattgatagtttatcccattcttgtttaccgaggaggacgagccgtttcccataaaattgggcgaagggatagtctataaagccggtgttgtctttggttccgggggagccgtgttggaatatttcgtattgtgtctttccgtttttcatacggtattcttcacccactaccctttgaccggaggtgagggtgtcggataagagaatataacaacgagctttgtcgctgagttgaacgactgtcgattttttactgtcatatacgataatttctggctggggcgatttataagtgcacaagtcaaaaataagaaaaccgatacaaaaacccagagtcagccaaagagtctttttagaacgattcttgacggttatataagatagtatgccgcaaatgaaataaagccatagatagcgagtttccaaccatacgctttcgatgtggctccacggtagtttgtatatatgtaggcttatctgttgtatatattgcagtaaaaaatcgacggtatttcctaaccaatcatagggaatatgtagggccgagagtaacaatagtaaaaaagagagtccgaaaacaacgggtaaaagaggcagtacgaaaatattaccgattagaaataatagaggaatagtgtgaaaataatagacggcaatgggtagggctccgatttgggcggcgatggatactgcaacgcaagaactaagccaacgaacgacaaagtagggtgaattacctccgatatttagtttggtgtagaatagcaagatagcggttactgccgagaaactcatttgaaatcccacatcgaaaatgaggttcgtgtcgtacgataacataaaaaatgctgcggcgaaaagtgcattgagagaactgttgcgtcggtcgagaaattcggctgttaaaagaaaggatgccatgatacaagctcgtacggccgatggcgataagcctgttatataagcataaatccataaaacgaataaagtgaatagaggtctcagttttctgcaagacttgaaaagagagaggggaaagaacaagaagtaaatcaaaggtgctacgactcccatgtgaagtccgcttacggctaacacatgtgaaagtccggttgccgaaaagtacgatcttaggtcttgtggaaattcctgtcgttcgcctaacaacaaagccctcaataaaagagtactgtttttagacaaattacaggattgaagttggtcggaaagatgtttttgtagatccgaagtagcctttcgaagattcgattttggtttttctccgatatatttccattgtttcccggtcaaatattgacttctcgatatacctttgtgcttcatgaacgaggcgaaatcgaaagcataaggattggtgttggacggtattgctttcggtcgaaattcaaacccgatgatgtcgccgtattcgagccgtcgagcttgaatacctttttcaaaatagagagctattttttctttatatttcacgatcgacccgtttgtatccgacagggctgttatcgtaacgggacagtagtaagagttcgttttttctacggctttgtcgtttacgtgagctatcgcgataggataaaaaccggaaggctgttgggatatgcggttttgagtgccatgtagtatcgctccgatagaaaagacgatcaggaataatccgactccgaaaatacttcgtttgtggtattgttcttcgatactgtctcgttttatgaatgaactccataaaactaagccgcataaagcgggaatgaggtttccccatatcggtaaacataggaactcttggtacaggatacctgccaatagaggtactaacaaccgtatgaatggagtgcgggctgccgatagggaggagctattcataagtcgattgtttgaatggggcttatgttcagaatcttcgggtcatatagcgcatgaaatccgattcgacaccaccggtttgaccggtattttgaacgaagcagaattcccgttcgcaatcgaagtcgctgatttcgatgactttcaattttccatcagctatttccgatgatacggcttgtatggaaacaatccccacgctgtcggtattgtataaaaaccgtttgataccttcggtggttcccaattgcatgataatattgagttgggataatttcaactggcgtgtacccaacgctttttcaaagacctctaaactgcccgacccctgttctcgaataaccaacggaattcttttcagttcctctatcgttatttcttcaagtttggccaatcggctgcgcgtactggttatacaaaccagttcgtcttgcataaaaggagtgtaatgtagatgtatttgtcggctgcaaccctcgatgagccccaagtcgatacgatgttcttcgactgctttttctatatcgctggaattcccgttgattaacgagagttttatttgtttgaatttctgttgaaatgtagccagatagggcggaagcacatactgagcgatagttgtgcttgctcccaaacggagctctccgatgtgacgctgggtcaataagttcatctcgaaatcgagctgtttgtattgtttaagaattttttcggcgtggcttaacagcagttctccgtcgggggtcagcgttatgtgagtacccattctctcgaacagtcgggtgctgtattctgtttcgagttcttgtatgtgcttgctgattgccggttgacttacatatagctctttcgaggctttggtgaagctgaggttgtgagccacactgcaaaaaacttttaatctgaaatctatcatgataagagtcaatttattcgttccaaatcttccatgccgccagtgcttgcaaatgaagcatttctattccgttttttattttgcaaccctgtcgggctgctttttggagaaataaagtcgtttcaggattgtaaataacgtcgtaacaaagatgttcggggcttagtgccgtgtagggtatgttcggggatttgtctatgtggggaaacatgcctaacggagtggtattgacaatgattttgtgattatcgattaggtcgggagataagtcttcgtaactgagtatatctcctcttttttgtcgggaaacgaatgtcggtgtgatatgcaaggcttttaacccggcatgaatagcttttgatgcaccaccggttccgagaataagcgcttttgtcatgcggtcgtccaataacggagcgatagaattggtgaaccctatgatatcgctattgaaccctttgagaaatatcttgtctccttgcctcgtaatcttgatgacattgaccgctccgatttcgcgagccaaagggtgcaattcgtcgagtagggggataactgctgttttatgaggaatcgtcacattcaatccgcacaattcatgattgtccgagataagctgtctcaaacaggaaatatcctgtatctcaaagttttcataggtggcgtttatatgctcgtcttcaaatttttgttggaaaaaagagcgggaaaacgaatgtcccaaaggatagcccactaatccgtattttcttttcataaagccgataaattaaccgttatatttcgatgccgataatatttcccctccattgtcggtcgtctcgataatttcgatcgcttcttttttcttttcgttagcataagccttgatgatttgaagtcctatccagcggcccaatcgtcccggtgcatcttgatgaagtaccgatacgaaaggggccggctcgatatacttgttgataagcatcgattcggtattgaacaagtgctttttaccgataagttgtttccatatttcagcttcgttctctttgcaccattgagcttgtttgtcggaatatcccaataggacatattcgtttgttcgaggaaatatctgagacaagcaataaagaattttcccttcgtatatcattcggtctaatagtgcgtttcgctgcgattggtagggatataaagtgcgtagccaaacttcgatgacatcgatgggaatgcggtcgctttcatgtaaattccgttcgtaattataatagcgttgttcataaaggggatagttttcacccaaataacagtctaaggaaaccgatagcaaagtggtatcgattgtgacgatcgattggttcagtcccgaaatgtgggtaagaatgcggggacgtttctgtggagcgaacaactcgttgtatcttaggaatgcgttctgtaattcggtaatccatacggtatcgttggaaaattttgtttctgtatccgcatacaactgggatatagcctcgttggataaaaacatttttaatcccttttggaacgatggagcatctcccaaaccgagtatgtgtcgacaataaaccggaaaaaatggggtgtatttatctataaaaagaaatattttggccgagtctgtttcttggacgtaagaaggtagtcctttatcgaatcgttctatggttacgatcgggttacttgaatggttcgatatttccgatgcttttccgttgcaagcgataaaacaaagggtaagtaaacttacgacgacggcatatttgcttgttttctcgggttgtatcataatactctctttttatgtctcttctgcaaatttacttttttcttttgagaaacccataaagaacatttttgttttgttatacggtgtataggacaataaatatctattaattcgaggctttttcggtctttattcgtacctttgcgatatatgtgaggaacaggacgtgcttgggcataagcgataaagcttgtttctgttcttggtttacactatctttgcatataatgagtaatagtttttttacttatcgggattaaatgacggattataatttatgaagcattcatatttcagccggaggttattgtcggtttttatggcttttgctttgggcctttccgtcttgttggccaaagattttgtcgtggtgatcgatgccggtcatggcgggcacgatcccggctctctcggcagcaaggcgaaagagaaaaacatcaatttgggagttgccttgaaattgggacgtctgattgaaaataatatgcaaggtgtgaaggtggtctatacccgtaaaaaagacgtttatttgaccttgcaggagcgagctaatatagctaataaggttcaaggcgatttgtttatttctattcataccaattctttggataaaaaatcccccaatcgtaggaaagtcgccggcgcttctacttggacattggggttacacagaagcaaggagaacttagaagttgcaaaacgggaaaattccgttatatatttggagaatgacttttcgactcgttatgaaggattcgatccgaattcgaccgagtcgtatattatttttgaattcatgcagtataaacacatggagcagagtataaactttgcttcggatatacaacgtgaatttgtttcgactgccggccgggtggatcggggggtaagacaggctggattttgggtactcgctaaaacgagtatgcctgcggttttagtggagctcgattttatttgcaatccgacgcaggagagatttttgaattccgaatccggtcaggagaaaatggcaaagtctatatacaatgcttttgtcaaatataaatcagactatgaccgcaagcaaaatgccggcaaaagggtagaggagtcaccgtcttcttccgccgttgtatcgcctgataaaaagactcaaacgggtgattcgaatgtggaagtctctgaacaagccgagaaatctggggttacttattataaagtacagttcatggctttgcctcggaaattgccggctaattccaaagaatttaaagggctttctcctgtcgaatattataaagacggaggaatgtataaatacacctatggaaaatctaccgaccgagacgaaatacagaaacaatataaaaaagtaaaatctttgtttcgcgatgcctttatcataaagttccgtgatggaaaacgggtctattgaaaggtattgtgatgctgaataaaaaatagaatatgaaaaagtggtttggaaaagaagttaagatagcactatcggttcttgcgagtattttgattttgtatgtgggaattaactatttgaagggaatcaatgtaatgaaaccttctaattattattatgtacaattcccgaatgttgcaggtttggcccagtctgcaccggtatctatcgatggatacaaagtgggactcgtgcaggaaattgtttatgattatgatgcaaatggcgcgattaaggtgctgttgaatctcgataaaaaattaaaaatcccggtcgatagtaaagtctatctcgaaaccgatatgcttggaacggcatcgattgttatcgatctgaaccctcatgtgagcgaatactatgatcatggagccgttattgaaggggaagtgaagtctggactaatgcaaaacatacaaggagagttgttgccccagtttgctttgctgttaccgaaactcgacagtattctttcgggattgcagacgctagtcaatgatcctgctttatctgcttcggtaaaacgtatcgatcatattaccgctaatttggagcgttcgtccgtgcaattatcacagatgatgaaagacgatgtgccggctattctcgacaatgtacaaggaataacggcgcaggtaaatcagttctcgggaactttgaattcgttacctctccaatctactatgatttcggttcagaaaacttccgataatttgcagcaaataaccaatcatttgacttctcccgacaatagtctgggactattgttgaacgaccggttgctgtacgataaagcgaatggcgttttggggagcgtagattctttgatgatagatttaagactcaatccgaaacgttatgttcatttttctctattttgatttcgtgaatatttttattatttagaatcattataaataaagagggccgtgtaatttttttgtaatcttcccagagctacgcttatatgtgtttatttccaaatttcgtataaagggaacgatttttgtcgtagaacatgtggaagattgtaagatattgtaaataagtgtgataataattttctatgtcagataatttgctttgtatggtcgggttttataaacaccttgtaatcaattgtttgtgctagaactgtaaaaagcaaatatttttgaatttgtttttgatgaaaaataatttgaattttgtactcacaaaagttttttgatagaagatttacataaaaatgggttcagaacagcatgttcagttgtgggaccgatgtttaacaattatcaaagacaatataaacgaagaggctttcgatagtttattcaagccgatagtctctttggggtttgatgataatgtgttgactttgcttgtcccttcacatttcgttattgagcagattgaggagcattatctcagtttgctgaaaaaggttctgcctcgcatatacggggcaagcgtgaaattgttgtatcgtgtacaaatcgttcgtcagccggaagctaccgtcgatttgaccgctactactaaatcgactgccgtaaagaagatgcagcagtcgatgcccgatcttttagaccctttcaaacaacgcgtttacgatgagctcgatccccgcctgaaccctatctatacttttgaaagctattatcaaggggcgagtaacatgctggcacgtacggcagcagaatctattgctgcaaacccggggagaaacacctttaatccgttgtttttattcggtgagtcgggggttggaaaaacccacctgattcaagcgataggattgcgtattaaagagaataatccggcttctcgtgtgttatatttatcggctcatgattttttagtgcaatataccgatgctgttcgtaataatcgggtgaacgattttatcagcttttaccagagtatagatgttctgttgatggacgatattcaggaatttgccgggaagactcagacgcagaatacattcttccatatattcaatcatttgcatcagagcaataagcaattagtgctcacttgcgacaggcctccggttgagttggtgggtatggtatcgcgcctgctgactcgtttcaaatggggtttgacggccgaggtcgaacgccctgactatgaattacgatacgatatcttgatgagtaaggtccgtcgtgatggattgtctatttccgaagaggttattgactatatagctcgtaatgtcaccgataatgtgagagatttggaaggagtcattgtatcgcttatggtacgttcgagtgtcttgaagaaagagatttcgatagacatggccgatcaagtgttggctgccagtgtaaagatgactcaaaaacagatcaccatagattcgataaaagaggctgtttgcggatattatggactggaaacgtcgagattgttggagcgtactcgcaagagagaagtggtcgttgctcgccaaatgtcaatgtatttggcaaagaaatataccactctttcgttggcaggaatcggtgatgtgttagggaaaaaagaccatgctacggttttgcatgcttgcaagactatatcggagcaggtaggtgtcgataaaaaattgcgcagcgatttggaagagatagagcagcgtattcaaggatagtaatataaattactcgaagaaaaataaaagagctccttttcaagagctcttttatttttcttctttaatcaggtaaacggaatccctgcttgacgatgaagtcaaggaatgtttttgaaaatagttcattgtcttttcggggagaacgtacgtctgtgaagacttgggctaaattctctttatggttctcttcgatatatttcttgttttctgccaaattctctttttcgaagtagagccgatgtattgctttgggggtatagtcttgatatgcttcgtggtgaagaatcgcttcgatgggaagtcgttctatttgcgcaggtatatctgcgggataacccaccgtaagagtggtaataggaatgacaaacttgggcagacgcaatatttccgctatctgaggagcgttatatgtggtagttcccagataacagcaacccaatcctgaaatttcggctactgtacaaaactgttgagctacaagcaatgcatcgatagctgccgtgacgaaggattggaaattgtcatatcccggttctgcatgattttgttcgcaccatttaataaatcggttgaaatcggcacaaaaagttaatacgacaggggcgctggttacagtgggttgattgaaatgagccggagctaacttttctttgttctcctgttctcgggttatgacaacactgtaaacttgcatattttgcgtcgtgggggctcgaaatgctgtttcgagtaactcattgagtaattgttcgtcaatatccttattgagatatttccgtatagttcttctttcttttaaagacgatatcatataaaggtagttattagaggttagatgttcgattgcaaaattaaaaatttatttgataagttatttatttcggttactaattattagtaactctttttattccttctcattgtaaaaaaagaaaatttataaactgtttttatcgagatgtttctttttatattgctcttatttttacagttgatttttaaagttggaaactttttaagcttcttgaaaatataatgttttgataactagaatattatttgtttgatttgggaaactttttgaaaattgaaaatttaaaaatgatattgtttgcgtatgtagaatgttttttataaacttgcaccgtaaatctttttcatcaagaaacctttgtctaaattaagtaaattaacgaaaactgaaaaacattttatctcgtggaaccaattgtttatacttacgacgaagcatatcaggcctcgttggagtattttaaaggcgatgagctggcggctcgtgtgtgggttaacaagtatgctctaaaagattcgtatgggaatatttatgaaaagactcccgacgatatgcattggcgtatcgctaatgaaattgctcgtatagagcaaaaatatcctaatcctctttcggcacaggaactgttcgatttaatgaaaggtttccgttatatcgtaccgcagggaagtcctatgagcggtatcggaaacaattatcaggtagggtcgttgtccaactgttttgtaatcggtctcgacggagcaccggattcctatggagggattataaaaatcgacgaagagcaagttcaattaatgaaacgtcggggaggagtcggtcacgatttgtctcatattcggcccaaagggtctccggtaaaaaactcggctttgacttctacgggtttggttccgtttatggaacgttattccaattccacgcgtgaagttgctcaggacggtcgtaggggagctttaatgttatcggtttctattaagcatcccgattcggaatcgtttattgatgccaaaatggtcgaaggacgggtgacaggagctaatgtgtcggtgaagattcacgatgattttatggaggctgccattgccggaaaagcttatcggcaacaatatcctatcgattccgacgatccgaaagtaacgaaagaggtcgatgcgcaggctatttggaaaaagatagtacataatgcttggaagtcggccgaacccggagttctattttgggacaccattatcagagagtctgtccccgattgttatgccgacttaggtttcaaaactgtgtcgaccaatccttgtggagaaatacccttgtgtccttatgatagttgccgtctgttagcgataaacttgtactcctatgtggtcaatccttttacgaaagaggcttatttcgatttcgatttgttccgtaaacacgtaggattggctcagcgaatgatggacgatatcatcgatctcgaaatggagaaaatcgataagatcatagagaaaatcaaatccgatccagagaccgacgaggtaaaatgtacagagcttaacttgtggtacaagattcaaaaacgcactttgcaagggcgtcgtactggtgtgggtacaactgccgagggcgatatgattgccgcgttaggacttcgttatggaaccgaagaggcgaccgatttttcagaaaaagtacatcgttcgttggcgcttgcggcttatcgttcgtctgtttcgatggcaaaagagcgtggggctttctcgattttcgatgccgatagggaagtcgataacccatttatcaatcggttgaaaaaggaagacgaggaactatatcgggatatgtgtaagtacgggcgtcggaatattgcctgtctgactatcgcacccacgggaacaacgagcttgatgacacagactacatcgggaatcgaaccggtatttatgcctgtttatcgccgtcgccgtaaagtgaatcccaatgatccagaggttcgtatcgactatgttgacgagacgggagatgcttttgaagagtacgtggtttatcatcataaattcatcacttggatgcaggtgaatggtatcgaagtgaaagagaattatacacaggaagaagtcgatgcgttggtggctcgttcgccttattataaagctacggctaacgatatcgactggttgcagaaagttcgtatgcaaggccgcattcaaaggtgggtggaccactcgattagcgtgacgatcaatttaccttccgatgtcagcgaagagatggtgggtcagctatatgtagaggcatggcgttctggctgtaaggggtgtactgtttatcgcgatggttcccggtcgggagttctcatctcagccaagaaggaggagaagaaacccgttgcggctattaatcaaccggccgagacattggtccgtcctatcgagttggaggcagacgtggttcgtttccagaataataaagaaaaatggattgcctttgtcggtttgaaagacggtaaaccgtacgagatctttaccggtttggccgatgacgatgacggtattttttgtccgaagaatgtagtcaagggaaaaattgtgaaagctgtgaatgaagatggtacgaagcggtacgacttccagttctccaataagcgtggttacaagactactatcgagggattgtccgataaattcaatccggaatattggaattatgccaagctgatatcgggggttctccggtacggaatgcctattccgcaggtattgaaattggtttcgagccttgaattggatagtcagtctatcaacagttggaaaaacggggtcgagcgagcgttgaagaaatatctgcccaatgggactaaggctaacgggcagacttgtcctcattgcggaaatgagacgctcatttatcaagaaggctgtctcatctgtacgtcgtgcggaacttccaaatgtggataatattcgagcaacaaatatagaccaaaaggcaaaagcgaactatcataggttcgcttttgttttttagaaaaaaggtatgaagaagagcatttgttttatcggaaagttcttacctttatgattaaaatataggatatagcgatgaaaataatattcgagatatattatcatactcgatggggcgaaagtttatttctctccggggacatagatgagcttggtgcgaatgaagagaatcgggctgttatgatggattatcaaggtgacggcctatggaaatatacaatggaacttccggcctctgcaaagaagttccattatgaatatctggtaaagtccggggagggaatccgtcgggaatgggggagtcctcatagtttctctccggggaggaatgccgggaaatatcgtttggtcgatcgatggcgcgatgttcctgccaatttgcctttttattcatcggcattcattcaaggtatattctttcgacaacacgccgattctgtcgtagaaacgatagaacaggggacgttcaccgttaaggttgatgcgccgcaactaaggcccgatgagaggctcgttatggtcggcgactgtccggaattgggcgattgggacgttttaaaagccccgttattgaatgattctgcttttccggagtggcagataaccctcgatgggagacaactgaaattcccgttcgagtataagttcgttatcgtgcgtacccatcaacgggaagttgttgcttgggagacgggagagaaccgtatttgccgggagaaaccgcaaaatccttctgaggccgtggtggtttcgggacttcgcttcaacggttccgaatcgcagtggaggggagccgggacggcgattccggtattttctctccgtacggattatgggttcggcataggggagtttatcgatttgaaatatttggtagattgggcgttaagaacaggacagtcgtttatacagctactcccggtgaacgatacgacgatgtcgggtacatggcaagactcctatccctataatgccaactctacttttgctctgcatccgcagtaccttcggttatccgaagtcgggtatttgaacgacgaggtggagcaagcccgcttcgatgcgttacgagaagaattgaaccggttgcccgatgtcgattacgagcgggtgaaccgtgcgaagatggaatatttgagacttttgttcgaggagcagggcgaggctacgctatcgagcgacggattcaaagccttttttcgggataatagtttttggttacgtccttacgcagcattttgcagtttgagagaccgattcggaactgccaattttagctgttgggaagaacattcgttttacgatgaatcggccattgccgactattgtgccgtgtggagtccgtggtataaatcggtcgcattgtattattatattcagtatcatttgcatgttcaattatccgaagtcaaggagtatgcccatcgggcaggagtggttttgaaaggcgatattcccataggaatcagtcgtaccagtgtcgatgcgtgggtcaatccgcaactctttcacatggatagtcaggcaggggcgccacccgacgatttctcgatagaaggccagaactggggatttccaacgtataattgggaggtcatggctcgtgatggatatgcgtggtggaaagcccggttgcgcaagatgtcggagtatttcgatgcttaccggattgatcatattttgggctttttcagaatttgggaaattccgttcaatgccgttcatggtctgctgggacactttaatccggcgttaccgttctctcccgaagagttgcagggatacggattccgttttgatgcttcgtggcaaacggttccttatattcgggaagattttttggacgagattttcggtgcatataccggagaagtgaaagagcggttcttggtacataagggagacggacgatgggatttgaatgtcttggtcgatactcagcgtaagatagtcggatatttctccggggcgagtgacgatatgagtattttgataagagacgggttgatgcggcttatcgacgatgtccttttcctcgaagatcccgatcgtccggggtattatcacccccgtatctcggctcagcatacacatgtttatcatagcctcgatgaagatcagaagtcttgtttcaatcgtttgtatgacgatttttattaccatcgtcacgatgttttttggaaagacgaggcgttgcggaagttacctgctctcatatcgtcgaccgacatgctggtctgtggcgaggatttgggaatgatcccgcactgcgttcccgaagtgatggagcgtttacagatactctcgttggaaatacaacgaatgcctaaggagtcttggcgcgaatttggggatacatgggcttatccttatcgatcggtatgtacgacctcgactcacgatatgtcgggaataagggtatggtgggaagaggatagagctcgaacacaacgatttttcaatgaaattctcggcgaacagggcgaggctccttctttctgtgaaccgtggatttgcgagaagatagtcgagttgaatctcttttctccttcgatgcttgctattttaccgttacaggattggctgtcgatagacgggcggttacgtcgggaaaatccgcaggaggagcggataaatataccggctcattcccgtcactattggcgataccgcatgcacttgtcgatagaacagcttttggaagaaggggtatttaatacccgccttcgggaattgattgaacgtagcgggagataggggcttttacaaggcatatccctcgaaatcgtatagcactgtcgacagataacgttctcccgtatcgggtaaaagtacgacgattgttttgcctttgttttcgggtaattgagccaatcgggtagctgcgaaaacagctgctccggaggagatacctactaatagaccctctgccgctgtcagttctctactggtgcgaatggcatcgtcgttgcttacggggattatttgatcgactacggaagcatcgaatgtcttgggaacgaacccggcgccgatgccctgtattttatgggatccggctttacctcccgatagaaccggcgagtctttcggttctacggctacgatttttatagcagggttgtgtttttttagtccggttcctacgccgctgatggttcctcctgtacctactccggcgacgaatatatcgattttgccttcggtgtctctccatatttcttcggacgttgttttcgcatgaatggcgggattggcagggttttcgaattgttgcagaatgatgcttccctctatctcttcattcagttctttcgccttttgaatggctcctgccataccttcactaccgggagtaaggattaactgtgctcccaatgctttgagcagattgcgcctttccatgctcatcgtatcgggcatggtcagtatgagccgatagcctcttgctgccgaaacgaatgcgagacctacacctgtatttccgcttgtgggttctataattgtggcatgagatttcaacagccctttttgttcggcctcttctatcatagataaagcgatacggtcttttacactcccggccggattgaagtattccagtttagcgaccagtattccgttcaactcatgttttttattgtaattcgagagttccaatagaggggtattccctatcaagtcggttagacttttggctattttcttcatgtttatatatttatggtgatacaaagatagtgcaaacgagggcaggagcaaattaatttgatgatatcaagtggagcttatatttgttttagtattgaaagtctgttaatctcccttttcgatacgttctgtctcactttcatgtacgaatgtttctttgattgcaaatacgcacaaagctcccgcgaataacagaatacccgaaatccccaacatgacgggctggctaccgcctaaccatcgtagcagagaaccacctactaaggccgcgagaatttggggaacacagatcgtgccgttgaacagtcctaaataggctcccatgtttttccccgagatggaattggtgaggatcgtgaagggtagagccaatatggctgcccaagcacaaccaatgaggaagaaaggcaggaacatcagataggcattgtgaatgaaaggaaccagtgtgaaaccggctccgccgataagtaggctgaggctatatgccgcttttctgttttttatcaaggggagaagcggggcccaacataccgagcctatggcttgtatggcgaataatacgcccgtccagttcccggctgattggtagccgggagaagccggatcggtcgagtgccagacgttgtcggcgatggctcctgtggaataggtccacatatacatgaaagccgaccaacagaaaaactgaacgagaccgaccgtccagaaaactttcggagcgtggcgcagtagggatatgaaattattcttctctgtcagttctttgtccgaaatttggtgaaatttttggaattccgcaggtggcatttctttcacccgtatcgaagaatagagggtacacagtatcaatatggctgcccctccgtagaaagagaaaattaccgaatcggggataactccgggggctgcgatattgctgataccgatataggtgaacaggatagggaacaagtagccgactaaacttccggcattggaaaggaaactttgtatggagtaagcgagtcctttttgccgttcgttgaccatatcgcctaccaacattttgaaaggttgcatggccatattgatagatgtgtccaacatcatgagggctattaacccgaaccacattgcatggatatatcccttgaatgaagcggcattaggcaataggcacatgactgctacggcaatggccgagccggcgataaggtatggaatacgtcgtccgaaacgattccaagtgcggtcgctcaatgcgcctacgataggttgtacgataattcccgctaacggaggaagtatccagaaataacttaaattatgcggatcggcccctaaggtggcgaatatccggctaatgttggcgctttgaagagcataggctatctgaacgccgaagaatccgaaactaatatcccatagccttcggaaacttaaatcgggttttactctcattccatcgaaaagagaggagcattgggtttattgtaaatccgttgttctgtttattccgggaaggtcatgccatacagtttctctatttcctgaggccaaaggttctcattcggagtttcgagaatcaacggtatgttatcaaaacgcttatcttgcattaatcgttcaaagaaccccatacccaatacgcctgcgcctaaactgtcgtgacggtctacacgggagtcgagtccttttttagcatcgttcaggtgcattcctcgcaagtattcgaatccgataatccggtcgaattcccgccaagtcgcatcatatccttcggctgtcgccaaatcgtaacctccggcaaaagcatggcaggaatctatgcagactcctacacgacttttgtcctctatccagtcgatgataaccgctaaatgctcgaacttgaatcctacgttactgccttgcccggccgtgttttctataacggcggtaaccccatcggtcttttcgagagccaaattgatcgattgggcgatacgggctagacactcgtcggtcgaaatctctttcaagtgactgccggggtggaaattcaatagtttcaatcccagctgttcgcaacgtcgcatttcgtccagaaaagccacccgagatttggtcagcccttcttcctgaggatgtccgaggttgattaggtagctgtcatgcggtagtatatattggggtgagaatccgtatttttcgcaattctccttgaacagttctatgcttttgtccgataacggaggcgattgccattgcctttgattttttgtgaacaaggcgaaggctttggcccctatggcatgtgcgtttaccggagcgttttctacaccgcccgcagcacttacgtgggctcctataaatttcatgattccggtcgtttttgttctttaagcaaaactacaaaaaaagccgattgctgccgagatgaatgagttaagatttgagatggttcctgaaaacttctttatctttgtgagtacgaagataggatgcggttcggtatagccaaatcggaaatggggtttccgtttgtctctgctctcacctttcgctatctttgtagttacaaagtatagagtatgaataaggtatatcattggatattttttctgctattgctcgccggttgtcaggatagaacggattcgtcatacgtgattacaggaaaagtggttaactcgctgactgacgggaatgtcgtttatttgtctcatagtaacggagatgaattggtgaatttggacagtgcgatagtcgatggcggagttttttcttttcacggagtacaggaggaaccgattatggcttatctgcggtttaaccgttatctcgattctttggctgtgcccgtgttatttgtgttggaaaatggagcgatggaggcggtgatggatacttcgtattcaagtgtcgcagggacggagcagaataacatattcgaggaatataaacgggaggcgtatcgcctcgattctttacgccgttgtttgcatagccattacgtcgaacaggtggagaagcgtatgatggatgccggtttggaacaatcgatgtgcgatgaagattttcgtttgagcagccaagaggagaagctggcctaccggtttattcgactgaatcattattcaccggctgcgatatgggtgctggaacagatgcaaagccgtttcgatgaagatgagttgcgaagccttttgtcgggattcggtgggcgaagcaagaatgcgcagatattgtccgatatttctttgcgcttgcgtaacgccgataaagtcgagccgggaaatccgtatgtagatgttccattgatagagtattcgggacggaaagagaatctgtcgggatatataggatatgcgagatatacggctattggcttttggcgttcggatagcgagccttcttgccgggatatgacgaaattcggagaactgtatcgggcgtatggttatcggggcgcgacctttttgtctgtttcgttggataaaaaacgggacatatggcgagaaaaagtgagaactttgggattgccttcacatcactgtgcggccgcggaacccgatgtaatcgaaacccgatatgctctggtgtcggttcccaattttatgcttattgcccccgatgggtccatcgattcccgtaacctgacggtgacaaagttggaacagaggctgcaagaactgttaccctatcgggcgagaagagatactgctgtgtcgtctgtaccggataccactggatttgtaaaacgattgtcaatatagtttgtctccacaatactcggcaatgtcgtagtaatgagattttttcatattgcaagtattgtaatttgtctaaaaatgggaatcaaggcaaaatagaacttctgccttgactctacatagagatcccctctgcctttaatctttgagattggcgaaaggtctgtgtcccccgtgctgttctttgaatcgggcgatgagtgcggtttcgaccgtttcgggatcttcgtcgggagtaggtttccagcacaacagcaaattgccggaattttttatttgccaaatgtatcggccgcctttgtgtccgcttttctttccggcaccgaagtctaagtattgttttaatcggctttgaatggtagctttgcaattttttaactttccagcttttccgatatagaccacgcatgtattttctacccagttggtttccaactcggttatcgacacattgggatctttccctttaaagaatcctcccgtaccgcgggagagaaattcgggaatattttcccccgtatagacgaccatatacacaccggctgttcgggggattgccgtactgtcggcttgcagttgtgctaccggaatgaatccctcgaaaccggcggctttcaaatcatcgatagtgttgaatttcatagctgtatcatttaatttgtttcactatatttgtagttaagtttgttttaataaattagattcccgttttcatcgagataaaatatttgattttcgttgttcattccttcacatccatttcttgcttggtattttggacatattaaacatggctccgaacgaaactgttccggaattatatcggtatcttcacaaaacgggcaacaaagagttggttggtttaatatttgtgtttggattgtatattggttttcctttgctctttgtttattctgtttatccaatttttctttttccgccttccctttttctgataaagggattctccattgttttggagatttttgcatttgataggcgtgaggaatcagtcctgattctactattttttcaaggctttgttatcagcgattaaacgggtaaaggtaagtaaacgattagcttccgctaaaagcatataaggcttgttttttgtataagctgaatatctttgcctgtatgattttttcgatatttcccataacgataattttagtgtagaatgtctgggtgatttgtaataacaagtcttggggtattgtattttattcggtattttattcgtatcgttaatgattttcagtacttagtcgcactctgtttcaataggtttgtttcgttcggcggcttgtcgcagcgtatcgtacaggcgggtgcgcagggtgtgtggcgcgactacttcgaccgatcggctgcgggaaagcagttccatgacgaagtcgttggtaatgcgcagtcgcagtttgacggtgatacctgtttcgtcttcggagagtatttgttgcgagtgatgcaggggtagtgttttcacgaaagctccatcgaccgaatcgtatttaagaacgatttcttccacggggtcttcgggattgttccatatcccgtaactttcccgaaagagggaggggatatctatgtgttcgtcacggagaaattgtgtatcttcgagaatatttatcgccgagatacggtccactccgaacgatttcagtttgctgtcggtgtcgtagccgatgagataccatcggtattgcgattctttcaagaaatggggcatgagccgtttgtgaacgatttttccgttatggcgtactaaggtgtagtcaaattcaatgggattcctttttcgtatcgcttttaggaggggagcgatgagttcgtgccgtatggcgttatggcgatgctcggcgaggacgtatttttgcaaaacactgtctgcgttgatagaactgagcagctcgaagttgagcagtagttctttgtagttgtcggtcatctcgtcgagttcggcaatgtagtatcctcgtgatttgtcgttacgaatgactatgccgaacatttcgtcgataagtccgaaatcgcgctgcatggttcgttgcgaatagttcgaatctttgttgtcgtatagggcgagggtattctctacgtgtgcgatgagtgcgtctgtcgggacgtatcgaactgccgatagtttgttgatgagtatcgccaagcgtcgtatttgactgagttttgccatatctgtttgtttttgcttcttgtgcaaatataatgatgcagaacgacaaaacgtgtcgtgttgataaataagtgggaatttaaaaagaagaacgcccgacaaaatcgggcgttcttactataagaagtttcgatgattattcggcaacgacttcgaaggggatttctacgctgacttctttgtgaagttttacaatagctttgtagttacccacttctttaaccgtatctttaataacgatttgtttgcggtctacgatatgtcccaatttttcgagggcttcggcaatctgaatgttgtttacagaaccgaagatcgtaccggtcgagctggttttagcaccgatggtaagagacacgccttcgagagcggcagccaaagccaaagcatcagctttgatcttttcgagcttgtgagcgcgttgtttcaaatcttcttcgcgaactttcaatgcagaaggagaagcgatcactgcttttccttgcgggataaggtagttgcgaccatatccgcttttcactgtaacgacatcgtctttgtaaccgaggttagcgacatcttctttcaatattacttgcatgctaaattcctccttcgtttaattatttcatcatatcagttacataagggagcagcgccaagtgacgggctcttttcacagcttgtgcaatacgacgttgaaatttcaacgaagttcctgtgatacgacggggcaggatcttgccttgttcgttcaagaattttttcaggaattcgggatctttgtaatcgatatacttaataccgtttttcttgaaacggcagtattttttctttttgatgtcgaccgagggaggggtcaaatatctgatttcagattgtgcttgtgccattttttagttctcctttacttcttctttgttagacgatttaacacttcttctctttgctgcgtattcggctgcaaatttatccattctgaatgtcaagaaacggattacacgttcgtcacgacggaattggatttccaatttagcgatgacagaaggttcggcgtcgaattccaacagggtgtagaacccggtggtctttttttggataggataggcgagtttgcgcaatccccagttttcttcattcacgattactgcgccttgttcggtgagaatcgttttgaatttttctaccgcttccttcatctgtacatcagacaaaacgggagttaagatgaaaacggtttcgtaatgattcatactcgtttagtttaacgtaattagtataatgtttttttatttgcgggggcaaaggtaggtattattttgtaattatgcaatgctttatactcgttttttgagggaacattcactcttagaagctgttttaaatttatagagaaataatattatcattgtaggcaggtatgttccggccatattgcgctcctgtctcgcatcttgaatcccttgatttttgtcaatagcccgctattgactgcctatctcggactccaatctgcttcaacatagggctcaatctgtctcggaataaatttaaaacagcttctactgtattttgcatattctgtggttaaatatcacgctttcttcggctcgtattttttgtaaaacagcgtgaggaggataaacccgactaaggcgaggggcgctcctatcagggcgggatattgatatcccagtccggcttgcaggggtagacctccgatatacgcaccgatggcattgccgagattgaaagccacttgtatacaggctgctcccagtaactcgcctcctttggcaaagtgaatgatagagatttgttgagggctcgacacggcgaacagtccggctgtacagaggcacatgagcagggctgtgagccagttgatatgggctacgaagaaaatgcccaataatgccataaagagtatgaattgggtagaggcggctacacgtccgggagtatatttgtcggacaacttcccgcccaagagattcccgactaccataccgaatccggccaataccatcaatagggtaatgctttctgtggaaaatccggaaactttcgtaaggaggggatttatgtagctataccaacaaaatacgcctccgtttcccaacatggtagctcccaaaataagccacggggctccggttttcaagaaacggaattgccctttgaaccctgtatcgggtagtccttcgacttggggaacccatttccagatgtaataaagtatgatgataccccatactcctaccagcatgaatgtgagtctccacgatagcaacgtgctgagcgatgttcctaacgggactccgaagaggttggcgatggtcatgccggcaatcatgatagagactgcctcggagccttttcccttgtcggcaagtttctctgcgacaaccgatgcgacgccgaaataggctccatgtggtaaccccgatatgaatcgggcgacaagcatagtccagtagttgggcgacagtgaggcaaagatgtttcctaccatcatgatcgccaccaatcctaacaaaatattttttaacgggagtttacgggcgagggtaagcatgggcgctcctgcacaaacaccgagagcataggccgaaatcaagtgtccggcggtcgggatactgatgtgcagatcggctgctacataaggcagtatagccatcatgacaaattcggctatacctaatcctaatgtgccgaatgccagtgcgataagactctttttcatttctatttaattacctattgagcagtgaggccgcgtgattttcgcggaccttctgaaaaaatcgggtgcaaaggacgtgaataagactgttttgtccaaaataatcgacttatttttttcgtgagagactaaattttttggcatctttttttaaatgcgaacagatagtatctgtcgtgtagtatttagaagctgttttaaatttattgagaaatgatattatcattgcaagtaggtatgttccggccatattgtgcccctgtctcgcatcttgaatcccttgatttttgtcaatagcccgctattgactgcatatctcggactccaatctgcttcaacataggtctcaatctgtctcggaataaatttaaaacagcttcttattgaaatgaagatattgcaaaaaaaactgcaaatccttcttcaacaaggatttgcagtttcaatgagccagatttacattatttgacctcgattgtttttacgactccgtcattactttgaacgggtaatttaggaagttcgacagacagaacaccgtgttcgacgtgagccgctatcttatttttgtctacgttatcgggcaatatcattgtctgttggaatttggaataagaaaattcacgacgcagatagtgctctttttttctttcttccttattttcgcttttcttttccatcgtgataacgagattgtcattgtcatcgatgtggatttgaaaatcgtcttttgtcatacccggagccgccacttcaatgcagtagtcgttttcatgctctaccacattgattgccggagccgttgcattagctttttccatccaatcgttatcgaagaaatcattgaagatactcggtaaccaaccttgattttttcttgtgggtaacatagttttaatctcctatttttaagttgtttaatcttttctttgacttcggctcttttcgataaccgacgtcattcggatatttgcaaacgacgtgccaatatatttttcgaggtttattgttcgggtatgtatgacaatagttatccaaagtggacaaaattattccatagagtaattattgtcacttttttcgggcaggggaagacgcagggaatcgataagtaagtcatagttttttcgattatgccataaatcggttatggcgtgattatacttttgctcaaaaaaagagaagagtatggaaatacaagaacaacaatttgtccgggaactggcggagagccgtatgcaaatagaattattgagaaatcgagtgttgctgcgttattacgcccaattgctcgaactcgatatcatggagcaaacccaagaagtgaaagctctcatgagcagtatcaacacgctcgaacgctatgcccgtaaatatgaaccgaaagaatcggccatagagtctgctcccgtagaaaacgggggatcgggagaagttttccggaacaaagagggagagtcggagagtatcgatgtactgtcggggaaaactatgccttgtgtttctgctcgttcgggggtagagaatatgacggctgtaccttcccggtcggtggcagtgcgaaatctccctaacggattgaagatagaatcggttacgactcgtggaaaatcgcatcgaaaatagattgcagatgaaaaggcgcaaatttctattcggtaaggttgttttgaaaattgtttgagctatctttgcgcaggatgcgaaaataggctgcattcggcaaagtcaagcgagcttgcttttgccctcatttgcactatctttgcgtatattgtgaaggcaggccgggctcggcgtaacaaatggaattcggttctgctccctttgcttgcatggactctacaattttacggaacgatgaaaacgatacgagagatatatcgcatagggtatggcccttcgagtagtcatacaatggggccgagaaaggcttccgaaatatttttgaaccgccaccctgaggctgtggcgttcgaggtcattctgtacggtagtcttgccgctacgggaaaagggcacttgaccgatgtagcgattctcgatacccttcaacctcatgccccggtcgagattgtgtggaaaccgtcggtatttctgtcgtttcacccgaacggcatgacttttcgctcgaaaaatagttcgggtgaagtgaccgacgaatggaccgtgttcagcgtgggaggaggggctttggccgaagaagggaagcctttcgacaagacaccggaattgtacgaaatgaatagtatgactcagattctctcttggtgtgaacggacggggcgcagttattgggaatatgtgcaggaatgcgaagaccacgatatttgggactatttggccgaggtgtggtcgactatgcgcgaggctatcgaacgagggctcgatcaggagggtgtattgcccggtccgttgaatttacggcggaaagcctcttcttattatataaaggcgaagggttataaagacagtttgaaaagtcggggattggtatttgcctatgcgttggccgtgagtgaagagaatgcatcgggcgggcgtattgtaaccgcacccacttgcggatcctgtggagtcgtgccggcggtattgtaccatttgcaaaagagtagggaattcagcgatacccgcattttaagagcgttggcgaccgccggtttggtggggaatatcgtgaagcaaaatgcttctatatcgggagccgaagtggggtgtcaaggcgaagtgggagtggcatgtgctatggcttcggcagcagccagccagttgttcggtggtagtcctgcgcaaatcgagtatgccgccgaaatggggctggaacatcatttgggtatgacttgcgatccggtgtgcggattggtacagataccttgtatcgaacggaatgcctatgctgcggcgagggctttggatgctaatatctattcggcttttaccgatggaagtcatcgtgtatcgttcgacaaggtggtggctgtaatgaaacagacagggcacgatttgccgtccttgtacaaggagaccggggagggtggccttgccaaagattacgaacagatgtaaaaaacagatttgtaaatcactctggaaatttcgatcgggacaagcctcgatcagtcgattcccggtcgcctgcttgtgcctatgttcttgtctcccacttagctgtttttggctcagtaggaaatcagtagggattgccctttcacatctccaacccctctccttaaaaattaccatttcttcggttaactactatattgctatgcagcacaagagagaaggggtaaggtacactaagagacagaagggctaaaataacagtagggcgatgttgctggaaaatttttacactcctcccctgtgttttgcaacgtaaaatataggggaggtggccgcaggcaggaggggttaaagaaatgtttctttggttttaccactatattgctctacaacaaaggggtgaaagggttacacacacaccaagtgacggaaggattaatagataagtatgccaggaggttaaatacattcccttttctcggagagtgagcaaaaagggaggtgaatttgtttttatggtgaagttactttatatttgtagttgtttaagcaatgattaatatatgaacttttccgaattgaatatagaaatggtgttcgctttgatgagcggtaaattgtctgctgcgattaatcggaaattatatcgtagttttcgaaaattgtctatcgatataacacccgaacaatggactgtattgtattatttatggtcgcgggacggagtgactcagcaggaattgtgtaatgttacatttaaagacaaaccgagtatgacccggctaatagataatttggaaaagcaacagcttgtcgttcgttctccgggcgtgaaagatcggcgtatcaatttgattcatcttaccgataaaggtcgggagttggaggtggctacgaagcctttggtgacggctattatgagaacggcgttggacggcttttcggatagagaagtcgagatggccgggagaatgttgaccaaagttttcggtaatttgaaaaattcgttggaggattaagaaaatctgtcatgattaaatatatgaggcatatattcatttttatagttgtatggcttgcggcagggacgatttgttctttcgcgcaatacaagcccgatcgtttgggagagggttttgaagcaaaaactatcgccatgccggatgattacagcggaagggtagtgacgactcttgttcggagtttatcgtcgtgcgacacgcataaagcggtgctttacgtgcacggatataacgattatttctttcaggaaacgctggctcggacgtttaacgattcctgctttaatttctatgccgtggatttgagaaaatacggacgctcgttattgccggaacaaacgccgttcgaggttcgagatttgcaagaatattttgccgatatagatacggctctgactcttattcgggaggagggaaataccgatatcgtgttgatggctcattcgacgggaggattgataacatcgctttactgtgaggcttatcgtaacgacttgccggtacagggactcattttgaacagtccgtttctcgacatgaatatgaattggttctatgagaagattctggttcctatcgtgtcggcttgggggcgttggtttaaaggaacgaagataagtcagggaaattctaccgcttatgccgagagtttgctaaaagatcatcatggggaatggaattatgataccgacttgaaatttaaggtatctccgcctgtttcttcggcatggatacgggcgatacatcgcggacacaatcaaattcataaagggttgcatattccctgtcccgttttgttgatgtattcgagtcaatcggtagacgggaataaatggacgcctcaacatcaatcgggagatgccgtactcgatgtaaaggatattgcccgctatggtcgcatgctgggaccaaaagtcacagagtttgaggttcaggaaggaatgcacgatctcgtactttcgaaaccttcggctcgtcaagctgcttattccgagatgtttcgttggcttcggagcaatggattgaacgaatgataccccaaagttcgtttattctccgagagtcatcgaaaacacgatgtggggcatatcgatgcctcggtagtgttttacgatggtatcgccgggcgtcataccgattcgttttgcgactccttgcgaaggaaggttattgtcgcggataatggagtaaatgcgttttatacccaaaatgtgggaggcatagtcggcacatgatcgtgcggcttcggtagcataccctttgtgccagaaatttttgcgaatgagatagcctatttcgggaacggtttgctctctgtatggttgcatagtgatgccacattgtccgatgagctctccgttttctttaagaacggctccccataaaccgactttgtcttcggcatatctctttatttgtcggtctaaccattcccggacttctgtgccgttgaatgcgccttcgtaggcgtacatcacctcgttgtcttgtaagagtttacaaacttcatgaaagtcgttcgggcataactctctaagaattaatctctgggtttctaatatcgttctcatttcacaggtcaccggttaaagacgttgttattcggcattctgttcggattgctgtttttccaactgtaagacttgtttgtctgcgagttcgagcgtgcgtacgttcagttgatattctcgtttgaggtcatcgacatttttcatgaggttggcgagctcacgggtcgctttaacggcttcgcgtgtgacggggtcgagcgatagagtgtatcggtttccccccaagtaagtgagggttatttttttactcgtattattcgctatgagtgctgcgacggcagaacattgaccgtctttgtatgtcacgatttcggtatatttgccgtcgttggtgaaccggtaattattggctccgtcgtacccgataacgagagtttcggctttacttttgtccgggagcgtcgcccgtatggaactgtgttttatcggtgtgcttccgtaatatacgcttgccaactgcatttgtccgttttctgtgaccaaaactttcaattggctacgatttatcgcggcttgtttgggaagtttcttatatatataattcccttccgtttggtatttggcatctttttcgaaccggaagtttttcttgaccgcttcgagttcggtttgtctcactttgagtacactgtctatataaagcagattttgctcgctttctttttgttttacgcggcacatgagcaacatacccgcttttatctgtttgaaggctttggggtataataattcgatactgtcgatagcgtttttagcattggcgtattgaccgttttcgaataacttccgagctttttcatattgagcgttagcttcattactattatctccgcaggagaataatactatcgcacaagagcatatccaaaagtaaagatatttagccataattgatcggtgtattgtatttgatgttaattctatctaatagaccctctctgtacatctttgacccccttaacggttttgagctttttcatcagactgttgagggaggagatgtcatcgaccgtgacggtgatatgtccttgaaaaaggccgtcgttcgagtcgatcgagatgcctctcatatatatgtttttttcttttgaaataatcgatgtaatgttcgttacgataccgatatcgtcgtttccgataactcgcaggacggtgacgtatttagaacccatttttcccgaccagcgggcattgactactctgtaacggtaacgactgtatatgtgtcgcgcgttcggacaatctttacggtgtatcttgatagttccttctgtggagacaaatccaaagatttcgtcgccgtaaatggggttgcagcatttggccaatttatagtcgatacctttgacatcgccgcctatgacgagctcgtcttctttcgattcgtcgggttctttttgtaaagtaaattcttctgccgtacgagtttcgtattgctcttcgttttcttttttatcgatttcgagataaaggtcgattacgcgattgacgtcgatatgttcatcggccaattcgttgtaaaaatcggtgacggttttatagcccattttttttataaggcgcatcattacaccgtcttccatctctattttgcggtttttgaatcgtctttgcaaaagctctttcccatattccgccgctttattctgctgttcgttcagggcttgctttatctttacccgccctttcgatgtcgcggctatgttgagccagtcttgcttcggtgtctgattgggagaggtaagtacttcgatcgtatcgccgcttttcagtttgtattttatggtttcgatctttccgtttaccttgccgccgacacatttgcagcctaacccggtgtgaatgaggaatgcgaagtccagtaacgtggctcccaaaggcaatttgtataggtctcctttcggagtgaatacgaatacctctttgtcgtagagatccattttgaaatcgcgcatgagttccaaagctccaccgtttccggccgcttcgagtacttcgcgcacattgttcatccaatcgtccagcccgttctcgcttttaattcctttgtatttccagtgggcggcaagtcctcgttcggctatttcgtccattcgccgggtacgtatttgtacctctacccagcgttgtttcggtcccagcacagtgatgtgtaacgattcgtatccgttcgatttgggaatggacagccagtctttcattcgcttggggttgggctggtacatatcggtgacgatcgaatataccttccaacagtctgccttttcctgttcgaggggagtttccagtatgacacgaatggcaaacaggtcgtaaatgtcttccaaatcggctttttgtttcttcatcttattccagatggaaaagatggatttcgtgcggcccttgatttcgaaatgtagaccttcggcttcgagtttttgttttaccggttggataaattccatgatgtatttatccctgttcctcttggtttcattgagcttgtgggctatctggtcgtagatttcccgattggtgtatttcagggagaggtcttccagttccgattttatggagtatagtcccaatcggtgcgccagcggagcataaagataggaggcctcgcaggcgatgtcataacggtatttttcgttggggtggtggtttatcattttcatgacgcaaagccggtcggcgatcatgatgatgataactcgtatatcttcggcgaacgatagtaacagtttgcggaaattctcgctttcgacggcagcctgtttggcatacaagctgttcgatttaatgagaccccgaatgagctgggctatgtcgtctccgaattctttttttacggtttcgatagtgaggaattcgctgacgaccaagttgaaaagtagaaccgaaataagcatactgcgttctaatcccaccctgtcgcataagatgagcgcagtattcagattacggacaaccggatttattccttgtttgtttcgctgatagtgccctgtttcgacggcttcggaaatgaggcgacgcatgcggttgaagtcttcgactcttaaaactgggcgactattgcgtaacagttgccgatagaccgataggacattttctttttcgtcgagtgtaaaatagcttttttcgggcataaggtgcgactgttttcaaaaattctgtctcaaatatatatttttgtgggtaaaaatgcgcttttttttagagctttttgtagttttgggaacggaattaaaattcattattcattacaagctatgtttacaccggaagatttagatttgtttgccgaaaaaggtattgacgtacatacggttgaggagcagttggcctcgtttaaaagcggatttccttttttaaggatattatcttctgcttctgtcgggaacggtatcttatcgcttgacgaacagcagacgcaatattatctcgatttgtgggaaggttacttgaaagataatcataaggtcgtaaagtttgttccggcatcgggagctgcgagtcgtatgttcaaagatttgttcgcattcctttctgccgattacagtgaaccacaaactgatttcgaaaagaaatttttcaattcgatcgaacattttgctttttactccgatcttgacgaagcctgtttgaagaatgaaggaaagagcataaccgatttgatagaatcgggcaattacaaagcggtggtgtccaatctgctcgaagcgaagggcttgaattatggttctttgccgaaagggttattgaaatttcatcgttatgcgacgaataaccgtacggctatggaggaacatttgacggagggagctctttatgccgccagttccgacggggaggtcaatattcattttacggtatctcatgagcaccttgccgattttaaagcattagtagccaagaagaaagcggattatgagcgacgttatggcgtacgttatcatattagtttttccgagcaaaagccttctaccgatactattgcggtcgatgcgaataacgagccgttccgagagaatggtaggccgttgttccgtccggggggacatggggctttaatcgagaatctgaacgacatagatgccgaaatcatattcgtaaaaaatatagataatgtagtgcccgacagactgaaagagccgaccgtgcggtttaagaaaatcatcggaggggtgctggtatcgttacaaacggagataaaccgttatattaccatgttgaaaagcgggaaatacacgatcgacgatttacgggaaatgatacagtttttgcataaaaagcttttcgtcagaaatgaggaaaccaaacatttggaggatgcggagctggctttgtatttgttgcggaagttgaatcgcccgattcgtgtatgcggaatggttcgcaattccggagaacccggcggggggccctttattgcttataatcaggacggaaccacatctttgcagattttggagagttcccaaatagatatgtcgaatccagatgctaaggaacagttcgagtcgggtactcattttaatccggtagatttggtttgtgccgtgagggataataagggagagaaatatgatttgccgaaatacgtagataaaaataccggttttatttcgcttaaatcgaagaatggcagagagctgaaagctcttgaattgccgggactttggaacggggccatgagcgattggagtactgtttttgtggaggttcccgcagagacgttcaatcctgtcaagacagttaacgatttactccgtccgcagcatcagtaaagtgagggaatcggcatggaatagagggcgatatgcagtggtatatcgcctttttttgtaattttgcacttgcgaggataagcatcgccgtggtatggacccaatagaattttgtttatacctctggcttgtattaccattgcatatgattgatgagaatagtgggggcatgaaatctaaccaatttttattcttcggctattcgttaagtaaaaaagaaaaataagaatagaaaatatgacgtttgaagagttcggattgtccgaagatgttatgcgagggctggatgccatgaattttaaggaggcgactcctgttcaggaacaaaccattcctgtgatattgcaaaaaagagatttaatagcttgtgctcaaaccggtacgggaaagacggccgcctatatactgccattactgaatctgcttacagaaaagcagggcgacggagatagagtgcgtgctgtgattgtcgctcctacgagggagttggcgcaacagatcgacatgcagttcgagggattttcctattttcttcctatttctactgttgtggtttcgggtgggggagacggcgcttcatgggaccagcaaaagcgggggttaacgatgggtgcggacattattatcgccacaccgggacggcttatctctcatttgaatatctcgaatattgatttttcgggagtggagtgttttattctcgatgaggccgaccggatgctcgacatgggtttttatgacgatattatgaaaataggtaaaaaattgcccgagaatcgtcaaacggtcatgttttcggcgactatgcctcccaagattcggcagttggccaagaatatcatgaacgaaccggtagaggtcaatgtggctatctcgaaaccgaacgaggccatagaccagtcggcttatgtctgttatgagagtcagaagatgggaatcgtcgattggcttttcaaggaaccggccggaacgaaaacgatcgttttctcttcttcgaaacagaaagtaaaagagttggcattttccttgaaacgaaaaaaatataaggtagaggcgatgcactcagacttggagcaatcggagcgcgagtcggtcatgcttgattttaaaaataataaaatcgatattttggtggcaaccgatgttatttccagaggtatcgatatcgatcaaataggattggtcattaattatgacgtaccgcatgatccggaggattacattcatcgcatcggtcgcacggcccgagccaatgccgacggtacagccattacgttcgtgtcggaaaaagaacaaggcaaattccatcgaatcgaattgtttttggggtatgatattcctaaacgggaattgcccgaagggttgggcgatgctccggtttattctcccaaacaaggtcggggaggtcaacgaaatcgaggcggtaagagaggcggaaccggtgctaaaaattacggaaagggaggtaagaggaaacctaaaaagaacaatagaggttcacagagtaccgaaatttcaagaaaacctgaaaggcatcatggtcgttccaagtcgtccgggaaacaatcgggtggtgtggaacaatagttgtaaggggttaattataagttttgactattattagaacgagtgaggttcttttgccgtatttgatttttttgtcgaaatattgaataactaacttctaaattcatatttatggaatgtagtaaggctcaaagtatagatgaacagagtttgcaaaaagcgcaatttctgtttgaatccggagatattgacaaaatagaggtgggaacaataaaaggtctgtgtcaaatccataggtctctttttgaaggattgtacgattttgctggtaagatacggaatttgaatattgcaaaaggtgggtttcgttttgcgaatagtctgtacttagaagttattcttcctgtaatagaaaagatgccggaaagtacttttgaggaaattatagctaaatatgtagaaatgaatattgcccatccgttcatggaaggtaacgggcgtgctactcgcatctggctggatttgattctaaaaaagaatcttggtaaagtcgttgattggcaaacgatagataaagacctttatctccaagctatggaacgcagccctattaacgatttagaattacgagtattgttacaacctgctttgactgataaggtaaatgatcgaaccgttatcttcaaaggaattgaacagtcttattattacgagggatatagcagaaaataatattcaaatttatctataaagatggaaacattttgacttcttctgttatagtgacaatgataatctgaaatagtaaatacgttgtttgctccttgcaattcgggaactgtatgtcatatttgattgtttcctattattaagatagattggaatggacactttggagaaaaaaatgaaagtaaaagagttgtggcaactttgtttccatgatgacgaacgatttgtgaatctcctgttcgacaatttataccgggacgagaataccgtctgttttgaaaaggggggagaggtgactactgcgttgcagatgttaccttatcgcatgagtttcggcgagacttcactcgatgtaagttatatttcaggagctgccacgagaccggagtatcgcaataggggattgatgggacgtttattgaaagagtcgttcgagattatgaggtctcgtaatattccgctttcggcattgattccggctgaatcgtggctttatgattattatgcttcgaagggttatgcttctgtatttttccgtcaggaactcaatttttcatcggcgcatcgattttatggagacggatatcatcgggtagctatgtcgatggacgagctttatcggtttttcgatgagcaaatgaggcgacgttcgtgttgcatacaacatggacgggaggatttcaatgtgatttgcgacgatatttatttggacggcggagatgtggtcgcattagccgattcgcagaatcggctttcggcattggcatttgtcgttcccggagatgatgcggtttttgtgaaggagttgttggcgataaataccgaggcaaaagaggctatgctgcatgaggttcagtcggcgtttcccggatattctcttcgagtctttacggagccgatgtcggagaatggggcggcggttcttatgggaatgattcgcattgtggacgttcggagggtactcgaagcggtcgcaaaaaataatcgttcgttgagacgagtatttagagtgcatgatcctttattgccggttaataacggtgtttttcttgtggaggaaggtgagtgttacgagggcgtgacaaatccgtgtgattttgatatcgatataatggagttggcagaaattgtattcggcggttcgaaactatcgtcattgttggattttccttcggtacgtccatatatgagtttgatgctcgattgataaaaagagttatttttttcttctcttgattttttgtgcttatttttgcttgttgaaaaaggtatgaaaagtttcggttatgcaatagtatcgatatttcttgcagtggtggttctcctcaccagtggaggaatttctattgtccgctgttgccagacacattgtttttgtttgcaaaattccggtacgcaagaagtagatctcctttccgatcgttattcttcggagagtcgtaatgattgttgtaaaaccggcggtatagcagacaagcacgctacgaaaggacattctcctttttgtaaacatgtgaaagtagaaaaactgaatttaccgatcgtagacattcctaccgggacagattgggggatacaggggacaatcgatttgacctattcgtttgggtcggtcatattcgctcctgtcacttctgttgtaaagtatataactacttcctatatgccgccaccgcgggattatctaaaacaaatcgctatacttttgatttaaaatccgatatatgtaattggagggaagggaatgtgccctttcgtgaaatttttgtcttatgtgatataggactgttttattatataatcggattaaaaagatgataagatatttaatatttccactttttttattaggtagtttgtcttcggctttttcccaagtacgagggattgtaaaagatatagccggagaaccgattatcggggcgaatgtcttctggttgggaactacgacaggaactacgacaggggagtcgggtaaattcagcttacctgaaacggggacgagcgataagctggttgtccgttttgtaggatatcgcagtgatacgatacatatcgacagggtcgataccgtttgggagattgttttacaggacggtgcggtgatggacgaggttcaagtttcggctcgacgtatgggcactatgaagatacgagctgggatattgaatcaggacatgatttccacggccgagctttctcgggccgcttgttgtaatctgggagagagttttacaacgaatccttcggtcgatgtcagttattctgatgcggcgaccggtgctaagcagattaagttgttggggctttcggggacttatgtacaaatgcttgcagagaatattcctaattataggggtgttgcttctccttatgcattgggctacattcccggtccgtggatgcagagtattcaagtctcgaagggtgcttcgtcggttaaaaacggctatgaatcgattaccggacaaatcaatgtggaatttaaaaagccacagacaaccgagtcggtttcggccaatttgtttgccaattcgttagctaagatagaggctaatttcgatggcaatattcatttgaatcagagggtgagcacggcgttattggctcattatgaaaacaatctcatggcgcacgattccaacgacgacggttttatggattttccccgggtagaacaatataattttcaaaacagatgggcttatatgggagaccgttatgtgtttcaagccgggataaaggctctcatggaagatcgtacgggaggacaaatgcgttcttatcgagcgacggacggaatgcctcggtacgatatagatattcgaacggaacgatatgaggcttttaccaaaaatgcctatattttcgataaggagaaaaataccaatgtcgctttgattttatcgggttctttacatcgtcaagatgccggttacgggtataaattatatgatgtggaccaatggaacgggtatgcgtcgctgatgttcgaaacagagttcgataaacggaatagtctttcaaccggtttaagtcttaattatgacgattatgaccagagttataaattgtcacatacgggtgatactttgggtgcaagggataaagaggtcgtgccgggggcgtatgtgcaatatacttataactggaatgacaaactcatgattatggccggattacgtgcagattacagcagtgtatacgggactttcgtaacgccacgtgcccatgtcaaatgggctcctaacgagattttcaatcttagggcttctgccgggaaaggataccgggccactcatgccttagccgagaataattatttgctggccagtagcagacgagtcgtgatagatcccgatttggatatggaagaggcttggaattatggtgtcagtgcggctctttatattccgctgttccataagactctaaacctgaatttggagtattattataccgatttccttcgtcaaatggtcgtggatatggatagtgaccctcatgaggtacattttagccaattaaaggggacgtcttattcacatacgtttcaggcggaggcgagttatccgtttttcaaaggttttactttgacagctgcttatcgtttgaccgatgtcaagactacttatggaggtgtgttgagggaacgtccgttcgtcggtcgatataaaggattgctgactgcctcgtatcaaactcctttgggcatttggcaattcgatgtaactttgcagttgaacgggggaggtagactaccgcaatcctacatgctggaacaggggattcctgcgtggaataaccggtataaggcgtatgaacagttgaatgttcaagtgactcgttatttcaggcattggtcgatatatgtcggcggtgaaaatcttaccgggttcaaacaaaaaaatccgattatagatgcttctaatccgtggggaagtaattttgattccacccttacttggggacctatgcatggggctgtttattatgtaggggttcggtttaactgggagagattatagatttaagtatatgaattataaaaatgtatgtgagaaatgaaacaggtaaaaattttatggttagtagccgcattgttttgtgcgacgacggctttcgggaaagatattaaaacagtagttttcaagacaactcccgaaatgcattgcaataattgcgagacaaagatcaagaacaatctccgctttgagaaaggggtgaaggaaattgtgaccgacctcggcgataaaacggttgccgtgaaatacgatgccgataagacgactgtcgaagctcttattaaagggtttgccaaaatcaagtattcggcagtccctgtgaccgagaaaaaagagggcgaaaaaagtacttgtccagaaaagactacttgcccagaggaaacggaagagtgctgtactccttccaagtgaggtttcggaaattattcgatcgatgataaaggtgtttgtcctgtgtgtggtggacacctttttttctacttaaaggtagacgcgataaccgacagcgaggcttatattacgcccttgaaaacctttaacgacttctctgatggttttggtaagacccaatgtataacgggcgtctacgaatactccgaagttaaattcgtaacctaatccgaaagcaaggctgaaatcgacagccgaatcccggtatatggagtagtcgttatttattcctttccatttgtccgagagggaaagtcctatacctaattgagggccgaattgcacgtttagtctgttacagggaaagaactttaccaatacgggaatatctagatagtgggttctacatgtgtaagtattgctgatgacagctccgctttcatcggtaaggtaaaattcatcgtccgtatatcctctggcagagtagaatagttcggcttgcatatcgaagtagttgttgaattggtaagttgcgataattccaccttgaaaaccggataaatagtctgcgtggtctcccaatttactccatggataattgattgtcgaccagttgattccggcttttccacccaaactccattgggcttgaatagaaacgggtatgaatgcaatacatattagcaggaaatattttttcatagtttttccttatttatattgttcgatacgggaatcgtcgatagctgtttcttttcttcccatttttgagagttgcaagatactagaaaaagtaatgagatacagacaataaaatatatgtgtttcatgtttacatgtttagatacctacaaatatacatgatatattttatattcgcttttgttatatttgcataaaagtgaaaaagatgtgtttgattgaacggcgggtatgtctgttttatctcttgctcatggctgtataaagttataacgggtggaagtcttttgtgtgttttagataattgagtatggaagggaatgaggtggaagaaaagattgttggagatttggactgggacgggttgcatcgtcctcgtatttattatgccgtagccactactttttgtggattgtttctttcggtactcgacggttcgatatgtaatgtggcgttacccagtattgctcgggagcttggtgtttcatcgtcggattctatttggatagtcaatgcgttccagttggttattatgatgactatcctcccttttgcgtcgatgggtgagcgctgggggtataagcaagtttatctgaggggtgttatcgtgtttacaatcggttcgttgttttgtgcactatctcataatttgtcattgctcgtgatttctcgtgtatttcaaggttttggagcggctatgattatgagtgtgaacacttcattaattaagctgatctatcccaagcggaggttgggtgaaggggttgggctcaatgcgaccgtagtggccatagcatcggtagcgggacctactttggccgccggtatattgtctgtcgcttcttggccctggttgttcgccatcaatgtccctgttggtgtagttaccttttttatggggcgtagatatttgcccgataatgcagttcgagttttggggcatcggtttaattggaaagaggctttgttgaatgctgcgacgttcgggttgttcatcgggtgtgtagaggcctattcccatgatgttcctgttacttgggttttgggaggtattgtttcgtttgtcattataggtacattttatgtgcgtatgcaacttagggagaggtatccaatgttaccgttcgatttgcttaaaatccctattttttcgatgtcggttgtgacgagtattctttcatttacggctcaaatgttgagtctggtagccatgccttttttattggcaaccactttccattatgatgctgttggcacggggttgttaatgacctcgtggccgttggtaattgtgtttgtcgcaccgcttgcggggttgatgatcgggaaggttcaccccggtattttgggtggggttgggttaactattatgagtgtcggttgtttttgtctttcatttattcctaccgaaacagggcacttcgggcttgtgtggcggttgatgttgtgcggaatgggtttcggattgttccagtctccgaacaatcatatgttgcttagttctgctccacctcaacgtacaggtagtgctagcggaatgttggcgacagctcggttgataggtcaaaccgtaggagcagctttggttgcgttgctatttcatttgtatggtgattccgctcctcatgatgccatgttgttggccggaatcttgactttgtgcggtgcgttttcttcttgttgtcgattgaaggtgagtatgccgaagtaataaaaatagaatctaaatgtatcgagtttgtgatcggtttgaaaagccggtgtattattgtatcgtttaaaggctctgtcattgtggaagactttgtcctatctttgttttctacttgataaaagagggtaatttttaatctttttgtgaggacgatagtgtaatcgggaaatgtgccagtttcatcagataatgattatagacattatctcacaaagaagctggatatgaaagtttcacaagaactacttgcaatctccaaaatgattacacattgggttatggcaataaaaaaaacgatagttgactatcgttttttttattgagtgtgacattatgagcttattgtgagcgtattatcgtttcagtatctttttggtgaccgtgtatccttcttctgattttacttttaccaagtagataccggcgggtaattgcggtacgtttgtcgtttgtaggttctcgccttgatttctttgaatgaggcaaccattggacgagaagatttctatttcgttgataggttcggctgagaatacagatagttcgcagctgctgagttggagtcttatttccaagttattttttgttgtttgctgtatcgcactcatgccgggaattttgatgtcgacatatacggggtagtggtccgagatatctttaaggtctactgtttgcccatcgatggtgattgttctgacaatgtgtgattctatattttgaatgcccgaatttttgtaatcgtggaaaagaatgtaatctatgcaagctgtattttcttcccgtcccggtatcgtgttgccttcggtgtcgctgaaaatctggaagtcttccaagaaaacgctgaatgctaggtttttccatctgtgggaatcgttcatgtctccggccaagaataccggtttgcgtatgtagtccaattcggtgcagatggctgctgcttcgttcatgcgatgtttgtcgtctaagtccaaatgggtgctcatgaacgagaaatcctcgaagtcggttcttatcaatatacgtcctacatcgctactcaatttcatcttttttatttttttgataggcaaccagcgtttcaccagtgttccgttgcctacactgcctccatcgtaatcggcagctatgccgtatacttgtacatagtcgagctcgctccatttggcgatgtcgtctaagagcacccttttccaacgaccgttggctgcgctgtccaattcttgcagggcgacgacatcggcatcgagcgctttaagtatgtttgcgaaccgtttggtattcaaatcattgaggcttcccggatctgtgccgcctttgcagtagtgggtgttgtaggtgagtaatcggattactccgtcttgcttgggataggtttgagagaaagagtttgacgcacaaagtaatccggctaataataatgtgatgcttttctttgtaattttcataatttataaataaaaagtaattatataaagatgttatttacttgtgggatttaagaatctagataacgataattggacgtatttatggaaatgtaacataaatgttgtccaactatcgttattgcctgtcattggtcttttttcctactaagggtcggaaatgtcattgccggtttgttagaaatcaagtccatcgtcccagtttggattttgagagagtgttccgttgctgagtagtcgttcttgggtggggataggatatagatagtccctatcctctctccactggcgaggttctttttcgatgtcgtggcagatgatgttgcctttgtctccatcggtcaagacgaactcgtctcccagtttgtagaatttgcgaatgttcttcaccgagggctttttgccagtgtagatgcagatgtccactttttctttgtcaccgacggttccatcgttcatgtcgaacacatcgtagcggttgtcgcccgatccttgcgtcaaaccggggaaatacattcctttgtacggttgttcgaatacttttccttctttccatcggataatgtcgtagtaacggaatccttcgagaagtagttcgatggtgcgttcgcgacgtatttcgaggatcacgcctttgttcgggcctgtgacgttttgatatccactttccaaagcgcacaaataggggtcgggatttgcgttggcagcgtccatatcgatgttgggcatgcccacgcggtcgcggattttcttgatggagattttgagatcctcctgtgtcaaggttcctaactcggctttcgcttcggcatagttcaagtagacttcggcagcgcggaacagaatgtagtcgttggaagaccctaagtatccgtcgcccgatgcatcggttacccatttggtgatttggtatccggtggtcgaagctccgaagttgggggacgatacggcgtcactgttgatacgcatgtagcccgggcctacgacggtttgggtgaggcgggggtcgcgattctgcatttcgtcgtagtattgcatggtttcataaccgggttggtcggtgaagcggtcaccgttggtcatgaggtagctgtttacgattttcttgttcatgccgggacgtccgtaggtgggggacaatgtatttgcgtttgcctcgtgcataacattttgagaccggtcgtagtcacgagctaatataacttcttcttcgatggcattcatcgaggagaaaagatcgcgatagggttgagctcctgtttggtagatggcgtagggggcattgtcgataaacagtttggaagccgtagcacattcgttcaagaacttttcataaccgggaattccatgatatttacggaatgttccttcgaacaggcatattctcgatttgagggctaaggcggtccaatgggttacgttgtataggtcttttttatcggaaatgttattgatggcataagtgagatcatcaaggattttatccatgataaagtcgcggctgtctcgtggcctgaacaattcgggatcggtggaagaaagctctctgtcgaaccagggcacttcgccgaaacgtttcactttttcgaaatagaaatatgctctgaaaaagcgggctataccgtcgaaatgttctcttgcatcgacatcgtcgcagcgcaccgagtggcttagatagaaattgaccgctctgaggtattcccagttccagcctccgccagatgtgggcacggtgcgtataccctgtacttcggccggtagattgaatatgcaaacgacatcggccgattcggtatatcccgaagccgcaccgggaaacattccgtagaattggttggtcgcactgcgtaattcatcggcgttgttgtagtaggtttccggggatatggcatcgagagggtattcatctaacatatcggaacaaccggcagtgcccgataaaagggcaatgaaactatataatataatgttctttttcatgatgataggggttaaaaagttatatcaagtccgaatgaaaatactttggaaaaaggataagttcgggcgtcgctgtttactgtgatttgctcggggtcgatatagtctgatttcagttttgtccaagtgaataggttgtctccactgaaatatactcttaaccggtcgagtttaattttcgaggtccattctgtgggtagggtatagcctacggtcagattttttaatcggcaataggctatgttttggagatatcggtcgtttttgtgagccaacgagcggttgccttgtgcggcgtatcctctgattttggggagataggcattcggattttcttcggaccagacgttgtccaagaaattggcgggcacgaaagaggaatagggtcgtgcaaaacctccccagaacatcatgttgtttccatcgggatagcggtgttgccgaccgactccttgaaagaaggccgagatgtctatgccgttccagctgagtccgatgttggcgttgtagagatatcggggttctttgttaccgatgatgaccatatcaccacgattgtcggctgttttttcaccgtcgtcgatgcgaccgcttccgtcgatgtctacatatctggggtcaccggcttgtagtcctttgtagtcgcctaccgccgtaacgaatatgttttcgcagacataactattgtctacggctttggcataggcggctgcttcttcgtcagtctggaaaaggccatcgattttgtaaccccagatttcgccgatggtcataccttcgtagtagctcgattttgcgaattctttcatgggattgtcgaattttgtaatcaccgatttgctatcggatagcccgaaagacaggttgtagctgaacggtttatttccaagattgaattgatcgtaccagcttactgccaactcaaatccttttgtgcgcaggttggcggcgttttctttcggaggagtcgcaccgtatacgccggggagcattttcccgggaaccaacatgtctttggtatcgcggataaacaggtcggcactgaggttgagcctattgtcgaagaatccgaggtcgagtcccaaattgtggtggataacggtttcccaagtgagttttcccgagggaggagccgagacggcagcataggtgacgggctcgccgttcatgagatatccgcccaagccttgcatattcagcttttgtatgtatggataacagtcggatatggcttgattgcccagagatccggtgctgagtcgtatcttaaagttagagaatactttgcgtatggggtcgaagaatgcttcttcgctcattcggtagcctactgcaaaagaggggaagagtccggctcggtggcctttgggaaaccgagaagaggcatcccatcgtatgttgaactcggccagatattttccggcatagtcgtatccgattcttccgaagtaacccaataaggcccatttgctttgtcctccctgtactgtcacgtcttttcctttttcaccgaggttgaagtcgttcagttcgtcggactggatattcagttttgtggcataatggtgtttgtagtggttttgctcatagttgaatccggccacagcgtatacgtgatgcgagttgaacgtgttgtcgtagtttagataggcatcgacgctgtggtagaaacttttttcatactcttggatcagtttgtttgagaaccaagaggcttgtgccacttcctcgacaccggggtattgggagtattttgcctgagtggagcgctccatgtaatcggtggtactgtgtttgaagttatagtttgcagtgaaagtcagccctttcatgattttgaatatggtgctccaagagtaggtcatgtatcggttttcctctatcgacttggtggttccgtctccaatcagaatatgtataccatcgctggggccggatgcttgaatgggattttggtaaacccaagttccgtcggggttataaggcatcagatagggcatcgcatggaaagtgaggctaggaatgttgtatccgtgccctacaccgggagccgtatatttggagtcgtataggcgagccataaatttgactgttaaccatttgtaggcatccgcactgacttttgccattaaattggctgttcggagtttgtcggtgttttgtcgatagataccgtcttgtgtcccataattcccgcttaacaggtagtttattttttgattcccgccggagatgctgaggttgtggtcccaagtggggcgtgactggtcgaacaaatagttgtaccagtcgaaattggcatagtacatataggattctacaccacctctgttctgtacgacggtccagggtctttcgggattctctgttttgtcaaatcttcttgcctccaattctttgtagtcatcggaagtgaaacgggtgtaggtgacaccgttgtatgatcgcatgaattcgtcaacgagcatggcggcatcgtatcctgtggttaagaagtcggttcttgtagtgggttttgaaaagctgaatcttccgttgtagttcacttgggttttacccgactcacctttctttgtcgtgatcagcaccactccaaaaggagcccgggctccatagatggcagccgaagaagcgtctttaagaaccgaaatagactcgacgtcacgagggttgattttatcgatgtttccttccataccatcgattaggatcagaggtttggattcttggttgatggatgcgaatccccggacgttcatgcgggttttttctccgggttttccagagccgaatgagatattcaagttgggtatcgcaccttgcagggcttgtcctaaattattgacagggcgtttttctaactgtttgtggtcggtgtatccgacagctccgatcaaattggctttcttttgcgtaccgtatcccacgactacaacttcgtccataatattggctttctcggacagctcgatgttcattgtgatgcccggtgtgacggcaatttcttgtgtgttgtgtcccacgtatgaaacgaccaatcgggatttcggggtggctttgatgtgaaaccgtccgtcgatgtcggtcgatacggcattgtttgtccctttaaccaatacggatgcgccgatgagcggttcgccattcggattttttacgaatcccacgatactttcggacttttgtctgtttttttcgttggttataattacatgtttcccttgtattgcgtatttgtattttaaggggcttagaatcatcgataatgcatcggtgagttttttgtttttgatgttcaccgatattttttgatgaatattgatttgcgtttcgtcaaaatcaacggagatgtcggcttgtttttctatcgatttgaatatttcggatagaggcttatctgtcatattcaaatcgattgtttgattttgggcaaaaacgaattgaacggagataagaaaacataataaaaaagcaattttaagcgaattctttttagatgattcgctggttttaatttttaaattcatatttttgtgcattagattttagataaatactgtaattgatgtcacaatgtaaggtgtttttctgatttcaaaccggagaaaatgttttgggtggttttctccggttctttttttcattggtgtcgatttttagttgatgaatattatatcgttattttttttgtatttcatgttttgcagtatcccttccaaaatggataatacttcgtctatcgtttcgtcgtggtcgaattttacagtgagcttgttgtttttgtatttttcttggtcgtaaagaatcgttacgttgtattttctttcgatcgtttttaccagtttcccgaagggcgcatttttgaaatatagttgtccttctttccaatttgagagtctttgggcatcgactatgtttatttcgcgtgaatgtgtgtcgcggtcgtatatgaattgttcgttgggagacagtatggtttcatgcggtatggagtctttggtcgagacttttatttttccttcttcgagtgtcgctatcgtttgtggagagttgctatatgactctacattgaatgtagtacccaatgcttcgatgtcgagagtcgcagtttttacgatgaagggcttttttttgtcgcgggatactttgaagttggcttcgccattgagaaacagggttctggtgtcgcccttgaatgtgttggggtaaatcagtatggattcggcgttaacccacacctcgcttccgtctggaaggaatatttgctttgctttttctcctttggggacgaagcattcgatgagttgttcggtatcttggggtgtgtcgagtatcaaccaagtgaaaagggctcccaaaatgggaagcagtatggtggcaacggctttatagatagtgctgcggaagttggccctttttcccggcaaaaagttgtttcgatggaatgtttctagttcggataatgtaaatgcatcgggtgtctcgttttggcaagagtcccatatctctgaaatcgcttgatctttttcttctcggtttttgggggagagcagccactttttgaaaagtatatcgtcggttgagggttggctgttgttaaaaaatttatgtattatgttttgtataatgttattcatggttccgtcttttatcaggagacggatatctattgaaatacttcctgctcgttaactttatttaaggaatgagaaaaagcaaggcggctaacatgttttttttgagttgtgttaatacggaactgatggtcttttcgactgtgttctttttaaggttcagtcgaagggctatttcatcgttggataggccttcttttcggctcatgttgaatatggttctcttttgcggcggcagacttgcgatggtcgcgtccatgaggctaagcagctctttggcgtatatttcgtgttcgaccgaggtagactgtggggctgtttcttccaaatgggatagatagttttgttcggttatttgtctgtcgaatgagtcgtatacagcgttacggcacattttgaaaagataggatttcagtgattgtatatgcccgagccggtcgtgcgatatccatagtttacagaaaatatcttgggcgatatcttgtgcttgttctttgtctttgatgaagccaacaaggaatcggagcacaatagggtggtagtgtataaaaatagcatcgaatgatgtggtatctccctcgataagtctttttagatggtatgtctctaattcaagattcatggtatagcaggaaggctccgtgttgttttttgacaaaagtatattttattttggataaagaaaaagaatgtaatgaattttatttgcgaatacccgaatgttatgaggagtgtttttaaggttcagcagaaaatccgtggggatagactttaatgttaatgaatgagggtggttggaaagatttcataagttttttgcagtaaaaaggttaccccttgctatgagtatactttccatctattttcttgcatcttaaccaccaaataaaggcgatgtatttggggggagtttttgtttgtattgatcccctcgccctgcgggcactccccctatattttgctgcgcaaaacacagggggagagtgtgagatgtatatccctttcgcctctgctccgatgttattcaaaatgccccgccatgttacggggtacggtaggagggagagggttaaaaagcactaatattttaaacttctccattgctgtgccccgtagcattacggggtgtggcgttagcaataggggaggtgtcacgaagtgacggagggattgaaaacgccatcgtatcagtctgtttataccggatatattcctttctcccctgacgtgtcccgtagcgttacggcgaactgtgttagcaataggggaatatacacgaacaatccccgttaattatcgactgagccacaatccttactgattatctactgaactcaaatattgtgtatatttaaaatgctaaaagcgtaatgctttattataaaagtactacgctttttgcttgcggaaagagagggattcgaaccctcggtacccgtaagggtacaacggttttcgagaccgtcccgatcgaccactccggcatctttccaatggtctattattttcgaggggcaaaggtagagaaaagaatcgagtagagattattttaattgtaaaaaaaactaaaacaaattgactattctttttctttccatgttttataggggtgttttgccagattggaattgtaatagcgggggtcgcctgtaacttctgtttctatgaaaggaggtaaatcgaattgttccgactctgattttagctcgatttcggcaataaccagtccgtcattattgcccatgaattcgtctatttcccatttgtgtccggcatagggataaatgtaccttttcttttcgatgattgaaggaagacagagtgatccgagcatttcggcagcatcggctaccggaatggggtattcgaattctttacgggtacaacctgtggtaacgcctttgagagtaatgaatgcattattcccggaaattcgtatgcgcacggttctttctttatcgattgagatgtatccttgtttataatatttgcattcgattgattcttgtcggtatgactggtcttttactgtgtatttgcgttctatttcggcactcatgatttaacatatataaatagaatgccgaatatagtacatttatttggtttaagaagcagaatagaaatcccgacattattaaacattgttaaacccataaagtgaagataataaaactccgagagccgacagtttttttgtacttttgcattttgaaaattcgagagaatcgaatatcgggaccaattataatatacagtttgtgagacttttatgacaaaaaagatatatgtggtattaaccctttgcctattatttataggacttcctatttcggctacggcacaaaaggcgacagtgataaaggggatagtacgagattccataacccatgagcctatatcttatgcttctgttttttttgtggggagcgataagggacttatgacggacgatgacggtaagtttgccgtttcggtacgtgataattttctcaatgttcgattttctacgttgggttatcgagagaagacggtttttgtaaagaaaggagccgagaatgatttggttatcgatttggttccatcggattatgtcttgaaagaggtggtcgtgaaaccgaaaaaggagaaatacagtaagaaaaataatccggcagtggagtttgtaaaaaaattgatagagcgtcgccacgtaggagatccgaaaaatcacgatttttataattatgaaaagtatgaaaagatgacttttgccctgaatgaattttcggaggaacaaaagaaaaagtggcttttcaaaaaattccaatttatttttgactatgtcgatacttcggaggtttcgggcaaacctattctgactgtttcgataaaggagaagatcgccgagaattattatcgtcgcagcccggaaactgagaaatctgtggtgaccggtattaagcgggcaggaatcgacgaaatattcagccaagaaagcgtgcaaatgttgtgtgaggatttattccgggaaatcgatattttcaggaatgatattactctgttgaataatagattcgtgagccctttgtccaacataggtacttcgttttataagtattatttattagatacgattctggtagacggcgtgaaatgcgtggatttaggctttgttccgtttaattcggagtcgttcggctttacaggtcatatttatgtgcccgaaggagattcgacctattttatcaagaaggtgaagttgaacgtgcctcgggatatcaatcttaattatgtcgagaatatgtatctcgaacaggattatgaacgtttggaagacgggacgcgtattaaaacgaaagacgatgccattatagagttccggattatgcctgccacgcaaggattgtatgcaaggcgtatgaccacatatgataaatttacctttactcctcccgacgatttgtcggtttatgattttgaaggtcgggagaaagtagaagtggatgctcaggcaaaaccggaagagttctgggtagacaatcgtcatgtgccagtaaagaaaaaggagaatgccgtagataaacttttagctcgactacgagaggttccggtgttctattatacggagaaagttttgggaatactaatcagcggttatatagaaacagggaaagatagtaagttcgatttcgggccgatgaatacgactattagtgcaaatgaaatagagggagctcgtttcagaataggtggactaaccaccgcccaactaaatccacattggtttgctcgcggttatgtggcttatggaaccaaagatgaaaaggttaaatattcgggcgaagtagaatattcgttcaataagaagaaatttcattcccgggagttccccatcaattctatcaagctgagccattcgtacgacatagaccaattgggacagcattatctgtacacgaataaagacaatgttttcctttctttgaaacgtaagggtgataataaagctacttatttaagaaagaccgagttgtcttatttgcaagaacgaaagggcggtttttcattcggtttgggtattcgtaacgagatacagcagatggcgaccgaccgtatcgcttttatcgatggatatggtaaaaagataaaggattatatgcaaaccaattttgaggtgaaattgcgcttcgctcccaatgaaaaattttaccaaacgaaaagccaacgtttcccaatcaatttggatgctcccgtgttgacactctctcataattttgctttcaaaaatttcttgggcagcaagtattcatataatcataccgaatttgggattcagaaacgtttttggttttcggcattcggttatttcgatgctattgtgaaggccggaaaggtatgggacaaagttccttttcctatgttgatacttcctaatgcgaatctttcttatacgattcaaccggaatcatatgctttgatgaatgctctcgaatttatcaacgaccagtatgtgtcgtgggattttacttattatgcaaacggagctttgttcaatcgtatccctctattgaaatatatgaaattgagagaggtgtttgcgttcagaggtttgtacggtagtttgagcaagaagaataatccactgtataataaagatttattcgtattcccgaagggtagtaccgaaatggataaaatgccctatatggaatgtagtgtaggtctcgataatatatttaccattttgcgggtagattatgtatggcgattgacctatcgggaaagtccgaacgtgagcaaaggcggggtacgtatcgccttgcatttttcgttttgagggtagcttctcttgactctttttgtgatttgtgatagtgcattgcccggtcgaaacgatggcgtggctaggggaatcgtttgccgtcttgttttcatttttgtaacctttccgtcctacggacacctcccctatattttgctgagcaaaacaccccgtaatgctgcggggcacggcagaggaggtttaaaatatctccgataatgaaagctgagataccctgcaaggctatgggatatggtaaaagaagggggataatgctcttctgtcacattattttagcgaatgagatagattgattgtatttggccttcgcccttgtgttgcgttggcacaataggggagaaaccgaggaaacaacagtttctgaggagagattctaaaattcaaatctactcccacgaattttctactgaatcgtttttccttttaattgcgttttgtggttatttgtgttacctttgcgatttaacttaaaagatgtatttatgagaaaagtatttgtatggatgtggcttgctttatttttaggcgggctgatttcgtgtgtctcctcgggagattcgtctcgatgggagttggtgtgggaagatgacttcaatggtacttctttcgacacggcaacatggtctaaaattccgagggctaatcctgaatgggctcgacatatgtcggacaatgaggcttgttatgaaatgcgagatggtaacttggtattgaaaggtattgtgaataccgatctcgaaaatgatactgctccgtatattaccgggggtgtatataccaagaataaacgaggatttcatggcggccgtctcgaagtgaaagctaaattgcagggtgcgcaaggagcttggccggctatttggctcaaaccttgtgacgaggctcaatggaagtggccgtgggccggagagatcgatgtcatggagcgtttgaaccacgattcgattgcttatcaaacgatacataccgcttatacgatcgagagaaaacagacacgtaacccgcgtcacggttcaaaaggaactattaatcccgatgattataatgtgtatgccgtagaaatgtatcccgatagccttgttttctttatcaatgaaaatcgcacctttacttatccgcgcatagatacgggagagggtgacgaattgcaattcccgtttaagaaaccttactatctattgatcgatatgcaactggacggtggttgggtaggtcctgtggatacgctcgatttgccggtcgaaatggtcgtggattgggtacgttattataaagagaaagaataatgggatagatatctgatgaaaaaaggagctctgtacagagctcctttttttgtgaacgatctgctcgttggctttacttaatgattccgtcacgccgcattaatgcatctatcgtgggttcgcttcctttgaagcgtttgtatagaatcatgggattttccgtaccgccccgcttcaagatattgtcgcggaatgatgtggctgtaaccgggtcgaaaatgccgttagccttgaatacggagaatgcatcggcatcaagaacttcggcccatttatagccgtagtatcctgcggcataaccacccgaaaagatgtgactgaattgaggtgcaatgagtgtaccttctacatcgggtaatactaatgttttatcgatagcggctttttcaaaagcgatagcgtcgtctaccggggcagtgattgtatgatatgccatatcgaggttcccgaaagtcaattgacgtacgcaagaataggcagcaaggtattgactggactttttaattttttccaccaattcgaccggaattttttcaccggttttgtagtggactgcaaagctgtcgagaaattctttttcggaaagatagttctcattgaattgtgaaggaagttccacgaaatcgcgatatacgtttgtcccggaaagcgaagcgtaagtgacgtcggaaagtaatccgtgcagagcatgtccaaattcatgtaggaatgtttctacttcgtcgtaagttaatagggcgggagtatccgacgtagggcgagagaagttcatgacaatcgttacatgcggacgactgtcttttccgttttcttctttccattgtcctttgaactctgtcatccaagctccggctcgtttcccgtcgcgggggaaaaagtcggtatatataactcccacgtaattcccgtcattgtcggttacttcgaatgcttcgacttcggggtgatataccgggattttaggattttttgtaaagtgtaatccgtataggcgagtggctaacccgaatactccttttatcgtattgtttacttcgaagtaggggcgtagcatttcatcgttgaggtcgtatttgatgtgtttaagttgttcggaatagtaactgaaatcccacggcattagggttatgtctttcccttcttttccgatggcgaaaccttcgacttctttaacgtcttgcagggctgccggtttgtaggcatcgagcagttgattcagcaagttgtagacgttggcactgttaccggccatagtgcgttggagtttatactctgcatagttgggcttgtcgaaaagttttgccatttcgagtcgcacttcggcgatacgttttaagacgggaatgttgttgtattcgcccgacagattacgtgaattgtatgcgcgatacagtttttctcttaaatctctgcgagaagaatatttcatgaaagcgctgtaactgggataggagagattgaccataaatccttctttccctttgctctttgccagtgccgcagcggcatctcgcgcgctttgggggagtccttccaaatcgttctcggagagcatcatgctgaaaagattggtttctttcaaaacattttgtccgaatgtgagtgtgagttggcttagttccgaggataattttctgtattgttcccggtcttcacctttcaattcggctccgcttagagcgaaagactcgtaggtctctttgaggagtgttttttgctcgggcgtgagatcgagctggtcacgacggtcataaacgaacttgatgcggtcgaaaagtttttcgttcaagctgatgttgttactgtgctccgaaagcatgggttgtactcgttgggagatttccatcatttcgtcgttgctttcggcgctcagtaaagcgaaaaatgcactagcgacccggtttagcatttgaccgcttcgatcgagcgcttcgatggtgttttcgaatgtgggcatcgaacgttgattgacaatcgcgtcgatttctttctgattttcttctatggcttttttaaaagccggttcgtaatgcgacaattttattttgtcgaacggtacagtttggtggggcgttttataagtcccgaaaaaaggattagcagcttgtgccatgattgtaaaaacagttaaggcagataataaaatttttttcatttctactgtattatgtaatgtaatttctatttataaacaaaggtcacgatttataattattctaactaatcttcgacacttaataaatattaaacaaagtaattcgtacatgtatttcgagtttgccgttcttttttatattacttttacactccgtaaaatgacagaaatatgaagaaacgtatcctctttctgatagccgtgtatttttggtttttcgttatgtttgttttgcagaaacctctattcatgttgtttcattgggatatttacggtaagattccgttaatggagtggttttctgtgatgtggaacgggcggccattggatttttctatggcggcttatcttacggccatacctgcattgtttgtcgtggcaacggtgtatttacagaagaaatggtggattccggtgtatcgtgtttattttgctattgtttcgttcgtggtggctgccataacgttgggcgatgccgtgctgtatagctattggggatttaggatagatgccacgcctcttttttatctcacgtccccggccgatgctgtcgccagtattccggcatgggaaactgtactgattgtctttcttatatttgtttatgccgctctgttgttgtggcccatgtggagattatcaggaaaaacgggttcttggcaaagacctaagaaatcgattttgtcctttgcttgtttattgttgcttgtcgcttctctttttattcccattcgaggcgggtttacggtgtcgaccatgaatgtgggcaaggtttatttcagtgatcgtatggcgcttaatcacgccgctatcaatccggtattcagtttgatgtcgtcattgtccaaatcggaagacttttcatctcagtatcgttttttcgaaccggaaaaggccgatgttatttttgaacctttacgtggcggggggccttcggtatatcctgccgacagcttgcaatgggtgaaagctcgcccgaatgtgttgttgatcgttcttgaaagtttttcgggagtagctatggagagtttaggtgggattcccggagtgatgcccaatcttgaaaaaatagcttcggaaggaattttgtttactaatttttatgccaatagtttcagaaccgatcgagggttaacttctatccttagcggctacccggcacaacccaccgcatcgattatgaagtatcccgccaagtcacaatcgcttccgggtatatcgaaatctttacgtaaggccggttatgacacgcagtttctttatgggggcgatgccgatttcacgaatatgcgttcctattttatttctatgggtatggacaatatcgtgtgcgaccgtgatttccctttgtctcagagattgagtaagtggggagttccagacgatgtaacgttcgaaaagttttattcattgataaaagagcaatctcgggagccttttatgaaaatgtttttaacgctgagcagtcatgaaccgttcgatgttcctatgaaccggttggaggataagtatttgaactcgatagcttataccgatagctgtgtaggagactttgtagagaaattgaagaggctccctgtttgggacaatacgcttatcgtctttgtcgccgaccatgccaagcgttatccccaaaatgtggagaaccacgatattgtccgtcatcatatacctatggtttgggccggaggagccgtaaagcgccctttggttgtcgatgaatatttgtcgcaaatggatttggcagcaactttattagctcagttgcatattccttatgatgattttacgttcagtaaaaatcttacggattcgaccaaagagcatttcgttttttatgcttttcccgatgggttcggatttgtcgataaagatggagcggcagtatatgattgtgcgtctcaatcgattctgatcgggcagaacgatagtaatgccattcacttgaacaagggaaaggcatatcttcaaaaattatatgacgatttagctcgtcggtaaaaatatagagtgggttaattgtatttttttagaagatggaaataagaaatacattgcctgaggatatggaccgtgtgatgtttatattcgagcaggccagacagtttatgcggttgaacggaaacttgcatcaatggacgggcggatatccttcggaagaggttctcgaagccgatatttcgtcaaatagcagctttgtttgtgtagatgaccaaaaagaagtggtgggcactttctgctttcgttacgggttttctcccgagccgacgtataacgtgatttatgacggagggtggttgaatgagaagccttatggtgtgatacatcggattgcatcttcgggaaaagtgggaggggtcttttccgcttgcttggaatggtgttctcgatacgtcgataatattcgtatcgatactcatcgggataatagggtgatgcaagaattattgcttcggcatgggtttcgccgttgtggaattatttatttggcaaacggggacgagaggattgcttttcaaaaagaggtttaaattagaatttatattaaagaaaggggcgggaaatgacattcccgcccctttctttttgtggaggacaatttttacttaaccgttagttttgtcgtcatattggttttatcgcctgtgatatgaataaagtaaattcccgcagcgagatcgctcaaatctaattgattttgttctcctgcatttatattgcccatgtatcgtgagtatatttctgttccattgagggtataaatcgagacatttacgtttttatcgtcgttttgtagaaggaaatagcaaatgtctgtggctggattggggtataccatcggccgggttggagttcctatctgttctataccagagtggtttaggcagtataccaagccatcgtatgcattgattttcccatatccccatcggttatttcctacaccggcaatgtttccggtatagctgtcggttgttgcggtattagatagaatttcacggacttgttccggtgtgagcttcggattggcttgcaaccatgtagccagaataccggtgactacgggggtggccatggaggttccttccatcgaaccgtagtaatagtttacggtatttacattttcttgtttgacgacatagttataatcttcgccgttacgattgctacttgtggaactattgaacgaagatattaacatagagccgggggcggtaatatcgggtttcatacgaccgtcggcggtaggccctaaacttgaaaaggagactaactgattaagggtttgaccggagttattccacatagagctgtttttgtgatctatgtaattacagctggtgtaagctccgacagtaatgattcgttttccggttcctccgatttcacccatagtagaattattgtctccgttcgtaaattcattattgccaaagttggagagccaagacatgtaagcatcggtccatgcattgattgtggtttcttcggggccagaaatttcgaatcctatataatagtttctattgtcgaatgaagataaattcaaatcgatagttatattcccttttttattgtagggattggttgcagtggatatgtaaatatttccgtcagctcctgtcggattggatatttttttactggcacttgcggttgtcgaaaaagattctgatgaataaacttcctttttatttagaatgtcatatacaaatactcttgccgatagttgtttttctgcatctccccagatatcgacggtacttgtcattgaaccgtagagataccaattggagacaaattcgactaacgatttcatgttggtatctccttttttcaaggtttttgtcgcatgtatattgtattcagcttcatttcccgaagctccgaccaaaagtcggccttctccttgcaattcgtcgcaaatacggtcgaatgtggaagtgccatcgtgcggaccgatatgatacccgaggctcatattgatgacacagggtttaccgacggattcggcatagtcgtagatatatttaataccgtctgtgatgcttgtattgctactactattgtcggatatgttatagctgacgagaaccaaatctgcatcaggagcgattccatagtattcgtttcctttatatgctccggctgcaattcccgtgacgtgggtagcatggctagctgcataatcctgttttgccgcgatgatttcctcggcattcgtatattctgttccataataatagccggtgggtggcgttcccgactggttttgattccatactcttttgatacgcagatttttaccttctgtatcgtaaaaattgatatggttatattggaatccgccgtcgatgatgccgactataacatctttgccggtataggcttgggtgagccctgtcccttcgtgtattttgtttacattgctaaattgttcggaacgaacgttgttcattcgttggtgaaccggacgtcctatttcgatgtactttaccgatggtagttgcgacacggaaatcaaattatctgccgggatattggtggaaagtatagtcccgtattgggcattgatgatgacttgattttcttcgagtccatcgagattattttcatctaccaggtagagaaatgccgaaacagccatttcaccgttgttttggttgattgcgtatgtcgatttgagttttgcctgttggctgatagtagaggtagattcgtaacttctcaaaaaattttgtgtcgatggagacattttttcttctgcgtttaacagaaatgagccgagtgtcgccattaagcaaagtgatagtaataattttttcatcgatttaattattaaatggtctttgataactaacggttgcgtaccggagaggaacattcgatatatgtaattcccggtaaagtaatgaattgtggtaatatttttaatggtatagcaaaactatatatcgagtcgctatattttatacaatgtcccccgatatggaggagattctcttccttgaaatcggcaaccgtgtgtaagtagcctgtcaacagataattcccattttgattgtgcaatgaaaatctttttatcaacaattcggacgggacatatttttctaaattattgccggattgtcggagatcggcgttccacgcatcccaaaacatgcgaaaagaagcggagacggacaaatgttccggcaaggtatagttagccgtgctggctggcttgtcggatttttccagagttttatttgtatgacatgctgtaaaggctatcattaaaaaggctgcgtatatatatttccacatcataatagaaaaagaatatttaaagaaacaaatataattatttatttctttaatattatattttgagatggtattttaatatatagttttttcttctatttgtaatctcgtttggattatttctgacaatctttcaagataggattcggtttgacaaccgaaataaattttgtccagtattttcctctctttatctttgctgaaaaaaattatgattttctatttttcggcaacgggtaatagccaatacattgcacagaggttggcagaagttacgggtgaaactcttgtttcaataacagaatgtctgaaaaatcataaatatacttgggagctgttgcccggagagagggtcggttttgtgactcctgtttatttttttggattgccgtctattgtctcggaatttatccgtaacttagatttatgtgttcgagggcaacatttcgtctatcatgtcgtaacttttggaactataacgggacagtcccattatatgatggaaaaggcattgagaaagaagggattaaatttggacggtagatatatcgtcaaaatggtagacacctatacattgatgtttgatttgtctgatgaagagaaatgtgagaaggttatgaaagatgcggaggtgtgtatagatcgtgttatagaaaaggttgtcaacagagttcggggtgattttgataataggaagattcctcactggctcgcttttccctatacttattgcaatcgaaagaaatcgactgcccctttcgtggcattaggtcgatgtatcggatgtggggcgtgtgccaagaagtgtccgatgggtgcaatagaaatgcgagataatcgtccgatttggataaaggagcaatgtttgcagtgtttggggtgtttgcatcgttgtccggtatttgctattcagtatgggaaaaagacaatcaaacatggtcagttcgtccatccgggggtaaagatgtgaaaatcgatttcgatatagtattctctgttgtgaaatttttattgttttagttggttcgatagaatgttactcagttgtttttccgaaggattattggaaatgattttaccgtcgggtccgagtaatatgaggtgaggaattccttgtatggcatacgtaagtatagtggtggattcccaacctttttgatctatgagttgtgtccattttatttggtttttctgtatatattctttccattcttcccggtttgtatcgaatgagatacctacaatggagaattgccgtttgtcatatcgttcgaataattgttttaaataaggagtttgtcttcgacaagggggacaccatgatgcccaaaagtcgaggagaatatatttccctttgtcgatatatgtcgataaagaagtctctttcccttcgattgtctgtaaaggtaagtcgatatacggcataccgggttctacgtttttcagtcgatccaacatgtgggaaactttttttaccgccggattttttttaaaagaaggagctgcatgggcgattagctctcgctgttcttcgggggagaataaaaagctgttttgtagaaacagatagatagaagttacgttgtcggtatttgccagaatatagtttcgagtgagtgtttcaagacctttttgttctttatcgaaagcctttttcaatattacaaaagtactgtcggataattgtcccgataaataatctttcagatatcggttcgtaatgtttcgtatgcgggtatcgtaggagcggcgttttgtctcatacatctgcaatctgtcgttcaacggcgtcccggatatatgagagacagaatcgagcgtaacataaatatctcccttttccaacgctatcagttgaggtggaatttgtgattgtttgtcgttcaaatgtaccaatattgctatcgtcggacttttttgttctcctttgaatgagaatgaaccgttagtgacagtagcactatcgactatttcgaattgttcgttgttttgtttttgcagtaagatggtttctccatcaggtataagattggtttttccggtgattttatattttccgccgcagcttgccataatcactcctatcaaaccgatccatatcaattgtctttttttcatagttattccgaatttgccgtttatggtataaacagaagattttcaacatagtttaaccgaaacagaggattaacaattggatatgtggttgatgagagcggttgttgatgttgggcagcttttgtgtgatagagcgtacagaaaagattttcgatgatgaagagtggacggagctttaccgaaattttcggaatatgcgaaaaattcgtgatattagtctgaatccccatatagcactttcgatcattgtgaagctatttaataaacggcctccgatatatcctgaaaccgatttcgcctctgagaacggtgctactacttgtcggtaggcttcattgacgtttttttgctgttcggcgatggctatttttagagcttgtttatgaaccgctatttcttcgagggtcagcccttgttgatttgtatggttttcgttcattttatagaggagttttttcattatccagtaacactttggagataaaacgagtgataggaaccaatatgagttttttcttgaataggataacaatcgctatgagtaacaggaacacagcaccgacgatcgcatagcttcctacgattcctacaagaggctctaaaagatagaccagtgcaaaggaaagatatatgccggctccaacagagagcaccaagatgacagcgaagagaaccgacatgcccagtataaccgaaattttttcagtagctgtcagtttggcatagtcaatttgtaaattgatatatttctttccttcttcaaatagttttcggaaagcgttgttttgagtatcgaacataactgtgttttttagaggagagaaaaatatagatgagagtatcaaaggtacgaaccggtacgctttgatatcctcatcttcattttagaggagttacttcccgccctttacctcttcggcaatttggtcgaccaagtgttccatatcttctttttttaattggattcctttgtcgtgaagtaatttacaaatgcgcgctctggtatcgacccctttttcgggagcaaacagaattccggcggcagcacccacggcggctccgccgagaaatgcaaacaataaatttagacctttcataatttttacattttaatgtggttatacaaagataacaaaataatcgggattttgttagtctgcttgaaaaagattttcggcttaatcggttgacaaaaaactataaaggataaataggggttgaattatgtatcgttaaagtcgctatctttgtagatacgaagatgggatgcggttcggcatagtcaaatcggaaataaaatttccgtttgtctcagcacttacctttcgctatctttgtaaagtttaaaagaaaaggtattataagattcctagaattatgtctgaacattctatctttattaaaggggcgcgagtcaataatctcaaaaatatcgatgtagaaattcccagagatcgttttatcgttattacgggattatctgggtcgggaaaatcatcgttggctttcgatactttatatgccgagggacaacgtcgttatgtagaaagtttgtcggcttatgcaaggcaatttttggggcgtatgagtaaacccgaatgtgactatatcaaaggcattccgcctgccatagccatagaacagaaagtaaatacaaggaatcctcgatcgacggtgggaacttcgaccgagatatatgattatatgaggttgctgtatgctcgcatcgggaaaacttattctcctgtgtctggggagttggttaagaagcatcaggtagacgatgtcgtgcattgtgccttaggttttcccgatggaactcgtttcgctttgcttacgaatttggttataccggaggggcgagacttgaaaactcacttacaaattttgcaaaaggaaggtttcccgagggtagaagtgaacgggcgtttccaagccatagaagatttgttgaccgatggggaattaccggagtccaacactgttcgtttggtaatagaccgaatgagcgtttcgcatgagaccgatacaatcagtcgattgtccgattccgtcgagactgccttttttgaaggtgggggagagtgtatcgttctggtttatgacggcgaagaaatacgggagtttagtttttcgaaaaggttcgaggcagacggtatcacattcaacgagccgagcgagttgatgtttaactttaataatccggtgggtgcatgtcccacttgtgagggatttgggaaggttatcggtatagacgaggatttggttgttccgaataaaactttgtcggtttatgacgatgctgtgatgtgttggcgtggggagaaaatgagtgaatggaaaaacgatttgatacgccaagcagactctttgcactttcccatacatcgtccttatttcaaattgaccgaccgggagaaagatatattatggcatggagccggcgatttcgagggaatagacggatttttcgctatgcttgaagccaatcagtataaaatacaatatcgtgtaatgctcgcccgataccggggaaagaccatctgtcctgtgtgcaaaggcagccgattgaaacctgaggctgaatatgtgaaggtgggagggcgttcaatctcagagcttgtgaatttaccgattagcgagttgaaagagtttttcgaccgtctcgaactcgacgaacatgatgctttgattgcgaaacgattgttgaccgagattaggaatcgtatttgttttctgcaagaggtagggttgagttacctgactttgaacaggttgtcttctactctctcgggcggagaaagccaacgtatcaatttagccacttctttgggcagcagtttggtcggttctttatatattctcgatgaaccgagtatagggcttcattcccgggacacaggtttattgataaaagttttgaggcagttgcaggagttgggcaataccgttgtcgttgtcgaacatgacgaagatattatacgggcggccgattatattatcgatataggtccgttggccggtcgtttgggtggtgaagtcgtttatcaaggaggcttgtctcgattacccaaagcgactcgtagctataccatgcgttatttgacgggtgagagtaaaatagagttgcctgcaaatcgccggaaatggaatcaatatatcgaagtagaaggggctgctcagaacaatctgaaatcgatcgatgtgaagtttccccttcatgttatgaccgttgtttcgggtgtcagtggttcgggtaaatcgtcgttagtcagagatgttttttatcgggctcttcttcggcattatggagagggcggagaaatgcccggaacgtattctcgtctttcgggcgatatggatcgaattcattctgtcgaattcgtggatcagaatcctatcggtaaatcgactcgttccaatcctgctacgtatttgaaagcgtttgacgagatacggaaactgtttgccgagcaacaaggagccaagcagatgggattttctccctcgtatttctcttttaactccgagggcggacgctgcgaggagtgtaaaggagagggaaccattactgtggaaatgcagttcatggccgatattgtcctcgaatgcgagtcgtgccacggaaaaaggtataagcaagatgtactcgatatcgagtataggggcaagaacatcagcgatgtgcttgatatgactatcaatcaggccatagagtttttttcggaggtgaacggaagtcaggagaagcgtatcataaagcggttgaagccgttgcaagacgtaggactgggatatataaaattaggacagtcttcttcaacgctttcgggcggagaaaatcagcgtgtgaaattagcctttttcctgagtaacgagaaacaggaatcgactctttttatttttgacgaacctacgacaggtttacattttcatgatataaacacgcttttgaaatcgtttaaccagcttatcgaacgaggtcataccgttgttatcatcgaacacaatatggacattataaaatgtgccgaccacgttatcgatatgggaccggaaggtggtaaagagggtggatacgtggtttgtaccggcactcccgaggagatcgccgagtgctctgcttcctatacgggaatgtttttgaaagagaaactaagaagctgttttaaatttattgagaaataatattaccattgcaagcaggtatgttccggtcagattgcgcccctgtctcggaataaatttaaaacagcttcttaaagtttagcgtatgcggtcgaggcttcgaaccaaacgctcgtctttattaatggccttataggctaaaatgtcgagaatgagggcgatgaaaggcattacgatataagctgtccacgatatgtttgaagccgaaagatcttcgcggaatgtataaccgctcaaaaagatgacgatatagaaagtcaccagaaagaatgcgtcgatcatgcagatacgcgcttgtgtaggtctgttcttatataggaaaatcgtgataaacgataatacggctattacggttcctaatacgaatactccccatgtgggggtaaatacagaagtttgtgtgactgctgcggcactatcctgtacaggagttgtcatagcttctacggtagagataccttgtgccgtgaaactgtaaatgccatcggtcgtatcgaattgagctatcggaagaaataaaaatacagccattaaagccgtcgtcagtaataaatagatcgattgtattcgttgtatcataatataagttttcttcaatggtgaaataggtacgtaaataaacggagcgggttgcagcttatttgtgcgctccgttttgcaaagatagaaaattgtcggtaaacacccaaatgtggatttgagaaatagctgtggaaaggagggtagggcgaatgggaaaaattaaataacctttttccggcacactatttgtaaattaagtttgttatataagggaaagctattaaatttacttcgattttatatttataaagatgattacgacagagataacgaaattgcagtacgatatatacggcttgcttgccgagagacgattgaaagacgctttcggtaaacttgctttattggtaaacgagttgcaagattgggtaagccgggacaagttgaacgagatggagacgtcgtatagatatatgatacaatatatgttggacggtgtcgaggatcccgaacggaagagtatttacgatcatttggttttgtctgcttatgtgttgaccgatcgggtttcggatcgattggccgggcaggtttctccttctcaatactatgggtggaagagatatgcgtcggccagccgaacgggtatttccttatcgtctcaattcgatgtgtgcgataatgaaatcaacgatctttctttggctttgttgcttggcgaacaagagcaagatttttctaaaattcaatcattgaaacaccgtatcgaggacacggcgggaaatctttttatggatatatggaccaattatccggcggcagaggaagattaccggtcgttaagagaggctcttttcaccgatcgttttcccgatactttcgtttcgcttcttctttcggctgtgttgttgaacttattgcaccggttcgacgagcaaaagttgctcattctgttggacggttatcgccattcttcgcccgagatacagatgcgttcgctttgttgtgccctcatcgtcatgtatatttatcgggagagattgcctcttttgaagagtttgcggaatcgcctcgatgcattgtgtgaagaaccgagattcaagaccgatgttcgtaatattttcttgcagttcatcaaaagtcaagagactgaaaaaattaccagaaaaatgaatgaagagctgcttcccgaaatgatgaaactggggccatcgctttataagaaaatacgtcaagaagacttgatgaacgatatcaatgcgctggaagaaaatccggagtggcaggagatgctcgacaaatcgggaattaccgataagttaaaggagttgaccgatttgcagatggagggagccgatgttttcatgagtacgttttctcatttgaagagtttcccttttttccagtcgattcaaaattggtttttgccgtttaatcccgatcatacagcgttgtcgggggtattgtccggtaagggtggagatacgtttaagaagatgatttcggcatcggctctattgtgtaattcggataaatattctttttgtttgagtttggctcaggttcccgagtcgcaaagggatttgatgatggggcaattcagtgccgagaatgcggcggttcaagagatggaaaaagaggaattgatgaagaaagaaataagtcgggaaaatatatccaatcgttatattcaagatttgtaccgtttcttcaagctgtatatacgtcgaaccgagtttacggatccttttgccgggcatatcaatttattgcatgtatctgttttgaatccgttattgagcgattcggacagtttgcgcctcataggggaatattatttccggcggggatattatgccgaggctctcgaattgttcgaaaggctttcggcggcatatcattcggatagtgaaatttatcagaagataggtttttgttaccagaagaaaggagactatgccaacgctttggaggctttcctcaaagcagaaattatttcgcccgacaatttctggacgattagacgcatagctacatgttacagaaatatgaaaaagcccgagatggctctttcgtattatcatcgtgccgaaaagatacagcccgaaaatttatcggtacagatgaatatagggcattgttatgtcgaacagaaagattatgaagaggcgcttaaatattacttcaaggtggattatctcgatcccgaaggtggaaaagcgtggcgtcctatcgcatggtgttctttcttagtcggtaaaaaagaacaggcgcagcggtattatgagaagatattggacgataaaccggtttctctcgattatttcaatgccgggcatgtggagttttctttgggacatatcagaaaggctatcgattattatcggcgcagtatagagctggacaacggtgattctgctaagtttctttctaatttcaagcaggatgctcccgatttgatctcctcgggaatcgctgcgagcgatatgcctattttgttggatcaacttatgtatggcattacagattctttataacctttgacaaggaggcgattctgtatatagatatgaggatagggcgttgttcgacatagtcaaaacggaagtggaatttccatttgtctctgcactcgcctttcgttatctttgtaaatacgaagataggatgcggctcggcatagccaaattggaaatgtgatttccgtttgtctctgctctcacctttcactatctttgtcatctgaaaaagtaaggtaatatttatgagacgtatagtttgtgtactgtttcttgtgggtgtgttttcgataaattccgtatgcggtgagactctttcggagtatcgggagaatttgtatgatttgttcattcaacagaaaataccccagtggggtgctgtcttgtcaaaaatgagtgctgataagtcgtgcgggacattggagggtcgccatgaaattttgtgcggttattatggccttgtaggacatttggtcgataaaaagaagaaagacgaggcgcagacttatttgaaaaccgctttggcgctttctgagaattatcgaaaaatgtatccgaacgatgctcggtttaaagcgttgcatgccaatttgataggtttgaaaatagccctttctcccatgcgtgcagctacgttggcatcgggtatgttgtcgtcggctcgggaggcttataaactggcccccggggatagttgggtttctattctgtacgggaatattttgttctatatgccgggaatattcggcggggataaagaggaaggtttggagtgctatcaacgagctcgccggggtatggaaaaggatattttgaccaacgggcatcattggctttatgtacaattgttggtgaccatcggggtggtttatgagaaatccgaacgttatgagcaggcgttagcgatgtacaagacgattatggagaaatatcctgagtatggatttgtaaaaaatacgagttatcctcgggctctgaaagcaatgcaacaaaaacaataatttgaaaagaagtgcaattatgaatgactatatgcaggtacggttcgatgtagagccgtgtagcgagatggcgacagatgttttggctgcggttttggctgaaatcggttatgaaagttttgtccccgacgaacgaggggttactgcttttgtccctcagggaaagtatgacgagatacgacttaaagaagagttgtcgcaatatcccatcggaggggtatctgtggcgtatgaagcgacattcgttgccgggagggattggaacgaagaatgggagaaaaattatttcaaacctattgtcgtgggtgaagagtgcgtgatacatagtacatttcataccgatgttccgcaagctcgttacgatgtgctgatagaccctaagatggcttttgggacgggccatcacgaaactaccactctcatgttgcaggcgatattggcatcggatcttacaggtcgctcggtgctcgatatggggtgtggtacggctgtattgggtattttggctcgtatgaagggggcagcttccgtcgtcgctgttgacattgatgaatttgccgtcgagaatgccattgaaaatatccgtttgaatcatgtatcgggagttgaagtccgtttgggaggaatcgaagccttgaagcaggagtcgttcgatgttatttttgccaatatcaatcggaatatattgctggccgatatgcatgcttatgtggcctgtatgaaacgtggctcacgtattttcatgagtggtttttacgtggaagatattccttttattcgagcggaggccgaacacctcggattgcgtttcgtcggttacgccgagaaaaacagatgggtagcggtcgaatgtatgagcgattgaaatagataagacaagttattcgtgggctcaggatagttagtggggattgtacttttgtacaatctaactcctcttctcagagactaccgtttcttcgggttctccccaatctgctctgcttatcgaaggtcctgcaattttgttttaacctcctcgcactttgggcactccccctatgtgacacagggggagaggttgaggagtatttctcttttgccttgtttcgattttaagttgcgataccccgtaatgctacgggacatggcaggggagaggtgtacaaagccattcttattctgaaacaagaaatgccgctcttcctcctccactgtgtttttgcaacgcaaaaatataggggaggtgtcacgtagtgacggaggggttaactcttatcttacagccaaaaagtttatgaaatcttttcaacccctctcctcagagactattgtatcttcgggctctccccaatctgctctgcttatcgaagattcttcaattttgttttaaccccctcgccctttgggcactccccctatatcgctatgcgacacagggggagaggttggggagtatttctcttttgccctgtttcgattttaagttgcgataccccgtaatgctacgggacatggcaggggagaggtgtacaaagccattcttattctgaaacaagaaatgccgctcttcctcctccactgtgtttttgcaacgcaaaaatataggggaggtgtcacgtagtgacggaggggttaactcttacagccaaaaagtttatgaaattttttcaacccctctcctcagagactgttgtttcttcggtgtctcccctattatatcgctatgcgacaccccataatgctacgggacacggtagggaagaaggagaaattcaatccatttcattcgctaaaattcatgtttacccccaccgattcaatataggaggagaggtagtaaaataaagtgaagatatttcaattcttctacgcttcgatatgtacagagatagttccccgcattattgtcgagatgtaaataatgacgggggaaagaaatgattattcagatttgtattgtcccaactcttgctgcaataaatcgattctgtcttgataatttcgaatcagattctgtaataaagaaatttcttgttgtttggatgcttttaaagccagctcttctgttgataaatttttaatatttttatagattttagaatcttcggagaccaaaaggttatcatttgccgaattgttattatatttgttcggactaataaaataggtctcttcacattcttcttgatttacgaaaatgaaaaagtcggtaatgggaaaattccagtgattggcaatactcagtaagacgtttatattcatatttccgcctcttactgccttgcctatggtgtttttatccaagccaagctctttggctgcatctttgtaggtgagcccctttcgatgcaaaaatcttcggagcgagtctccggaataaacgagctttttaccgtctttcatatggaataaggtgtaaacgattaaattctctctgaaactattatgatagtttgtttataccaatatacaaaaaaatcggcaattagtttgctcgaaggtttcctttcggaagagaagaggaggaatgtttttacaaccgcatttggtttgatttggtattaaggggaggtcgatgacggtattgaaaaaggtaatgggttgaaaaggaactccgttcaggggttatcttttcttgttaataatagagtttattagacttacaaataatccacgtaccatttatcttcgtccaaaaatcttctttttttactatctatcaagtatttattatcctttttgacaattacatactgtagatatttgttgtcattttgtgttattacaataaatctattctttctactttcttgtatgtcaactattttttcctctttagaatcataaatgtaacttccttcacttccccatgataaagcattcggacgactcatttttcgttctttatttgtacaatatttgatgaatatagaagctaccttttgtttcatcatatcctgtttttcattccatgataattgagtattttctttttttaagttgttgcaaaatttttcccattcattcatttctgaaataaaatttagaacgagttcttcaatcgttttttttgttacatcatccataattgcgcctttatatatgttttttgaacgttataattatctattattaatgtatttataagagcacctgcgaggtgttgtttactgatgtaagatacacctcgcaggtgcatttcctaatctctaatggctgtaccttataagccgtccaatgtgtcgagaggattggggatgctcgatttatgcgcactcgttacatgcagataaattgaggtggtcttgatgtcattatgacccagcagctcctgtatggtcctgaggtctgttccttgctccagcaagtgggtcgcaaacgaatggcgcagcatgtgtacatgtacccggtgcttgataccggcacggctggcagcttctttcagtacctttaccagcgcactggcggaatactgttcaccgggtttttctccctcgaacagccatttctgcggacggtactccttgaaatattccctaagatccttcagtagcttttctgaaagcagcgaatatcggcatttccgtcctttgcccatgatacgcacaagcatccgttcactgatgatgtcttttggggtaaggttcaagagctcgcttcttcgcaatccggcggagtaaatcagtgaaatcatgcaacggtgtttcgggttggacaggcaggagagaatgtggcttacctcattcctgctcaacacttcgggaagtgacttgtattccttcgcacgggtgatgccaccatagtattggcgctgtccgccttttacctgctcatagtagaacttgatggcgttgatgcgcatgttctgctgtgaaacggagattttcttctcgttcacaaggtagaggatgtacttgttgatgtccgccactttcaggcggtcgatgttccgccctttgtggtattccataaagtcgctgaaataggcacggtaggtttttatggtcgaggggctataacgcttttgttccagcagttccaagtatccttccggcagtgtgtattccctttgaggtttggggtgtctgacataaacccggctgtaatcgatataggcatgtggagaatagcggtcgtagaaatccggcagtctgaaagtggcagccgttatgtaagcagacccgtagccaaacgtctctattcctgtgtcttgggtgagcagctcgtgtatttctttattacctgcatagtctatgcgtatatattctctattgtccctcttttctttatatagcacgatgtttcctctttgtctctgaacgttgcccatattgttggaaataatattcattatcgcaaatataaataaaagcaagaagcgatcgttccaattagacggtttttattttattaaaactcccttaatggggatatgtggctgtcgcataacttttcgggaattttgtcggcgaatagatgcttttcccgttgggggaatgtgtctgcccagtattttttttcttgtacttcctttttttgtttgtttgagaaaatatttttcgattttttttgtaataaaatggtggtcttgaatttcttaatattttactataagagaagtatctatacataaaaattacagaaaaaattctttatttcaaactatttgtactacttttgttgtcagatgtcgggcatatagattttatgctcggcttgttttgcggataatagtatatattctatatatttatataaatagtttggcttaaacaacttaactaataacaactatggcagaaagtaaagaaaaactgtttgaccagttccctccggtgtccacacaggaatggaaagaaaaggtcgtggcagaccttaaaggagctgattttgacaaaaagctcgtatggaggactaacgaagggtttaatgttaaccccatgtaccgtgccgaagacatagcaaatttgagtacgaccgattctcttcccggtgaatatccctacgtgcggggaactcgtgccgacaacaattggctggttcgtcaggatatcaaggtaaccgatgtgaaggaagccaatgtaaaggctctggatattttgaaaaagggtgtggaatcgttgggattcgagattgccaaagatttgatttcggtagaaaacttggaaactttgctgcatggtatcgacatggagaatgtggaattgaatttctccacttgcatgaaaagcacagtgaaacttgccgaaacagtagccgcttatttcaaaacgactcctgccgatttgcaaaaggtatcgggctcgattcgtttcaatccgtttaagcgaatgttgaccaaaggccgtgatttcgccgattatgccgatcaggccgtcatggttatcgatgcggtaaaagagttgcccggattccgggtattggcagtcgatgccgtgatgttgaacaatgccggatcttttatttctcaggaactcggttttgctttggcttggggtaatgagtggctggccgcccttacagataaaggtctgtcggtcgacgaagtcgctaaacgagtgaaatttaatttcggcatatcgtccaattattttatggagcttgccaaattccgggctgcccgtatgttgtgggctcaaattgtgaaacaatataatccggcttgcgattgtgcttgcaaaatgaaggctcatgcgcagacttcggagttcaaccagactatattcgacgctcatgtgaatctccttcgttcgcagaccgagacgatgtcggctgctttggcgggtgtggattccattacgacgactcctttcgacaaggcttacaaggaaccggacgatttttcggaaagaatcgctcgtaaccaacagttattgttgaaagaagagtcgcatttgaatcgtattaccgacccggctgccggttcttattatgtggagactttgacggtttctatcgccgagcaggcttggaaacttttcctcgaagtggaagagaaggacggtttctacaaagccgtgaaagagggattcgtacaaaatcaagtaaacgcttcggccgagactcgccatatgaatgtggctcgtcggaaagaaatactgttgggaacgaatcaataccccaatttcaatgaagtcgccagcgataaaatcgttaacggcgaagcgtgcggttgcggatgcgtaaagcacgagggaggacatcattgcgaacctgagttccccgtgttgaataccaaacgggcagccagtgatttcgaaactttgcgattggcaacagaacgttcgggcaaacgtccgacggtattcatgttgactatcgggaatttggccatgcgtttagcacgttctcaattctcgtcgaatttctttgcttgtgccggatacaagatcgtcgacaacctcggtttcgagaccgtgcaggccggaatcgatgccgctttggacgccaaagccgatattgtggtactttgttcgagcgatgacgagtacgctcaatatgctccggaagcattcaagatactcgacggtcgcgctctgttcgtcgtagccggagctccggcttgtatggacgaattaaaggctcagggtattaccgagtttattcacgttcgttcgaatgtactcgatacgttgaaatcgtttaatgaaaaactttcgatttaaaggcggacaatttgtatcacacaagaaaaaacaaaaagacaatgagacctaattttaagaatatagatattacgaaggatgctttcgcccattcggcagggaaagtagcccatgagggtgaaaactggataaccccggagttgatacccgtcaaacctgtttacaccaaagaagacctcgaaggtcttgaacacttgaattatgtagccggacttcctccgtttcttcgtggcccgtacagcggtatgtatgccattcgtccgtggacaatccgtcagtatgcaggtttctcgaccgcagaggagtccaatgctttctatcgtagaaacttggcttcgggacagaagggattgtctgtggcattcgacctcccgacacacagaggatatgatgccgatcacgagcgtgtggtaggcgatgtaggtaaggccggtgtatcgatttgttcgctcgaagatatgaaggttttgttcgacggtattcctttgaacaaaatgtctgtatccatgacgatgaacggagccgtgttgcctatccttgctttttatatcaatgccgggttggaacaaggcgcgaaactcgaagagatggccggaacgattcagaacgatattttgaaagaatttatggtgcgtaatacctatatttatccgcctgaattctcgatgcgtatcatcgccgatatttttgagtttacttcgcaaaacatgccgaagttcaactcgatctccatttcgggatatcatatgcaggaagccggagcgacagccgatatagagctggcttatacgctggccgacggtcttgaatatttgcgtgccggaatcaacgccggtatggatattgacgcattcgctccgcggttgtctttcttctgggctatcggcatgaatttctttatggagatcgccaagatgcgtgccgcacgtatgttgtgggctaagatcgtaaaacagttcaaccccaagaatccgaaatctctcgctttgcgtactcactcgcaaacatcgggttggtcattgaccgaacaagatccgttcaataatgtgggtcgtacttgtatcgaggctatgggggctgctttggggcatacccaatcgttgcacaccaacgctcttgacgaggctatcgctctgccaaccgatttttcggctcgtatcgctcgtaatactcagatttatattcaagaagagacttatattacaaaagaaatcgacccgtgggcaggttcttattatgtagaggctctgactaacgagctggctcataaggcatgggaacatattcaagagatcgagaagttgggcggtatggctaaggccatcgaaaccggactcccgaaacttcgtatcgaagaggctgccgcccgtacgcaggcacgtatcgactcgggtaaacagacgatcgtgggtgtaaacaaataccgtcttgaaaaagaggctcccatcgatattctcgaagtcgataatacggctgtgcgtaaagagcaaatcgagcgtctgcaagatttgaaagctcatcgcgacgaagccgcggttaaggcggctcttgatgcgattaccgaatgtgtgaagacgaagaagggtaatttgctcgacttggctgtcaaagccgctaaggttcgcgctacgttgggagagatttccgatgcttgcgaagttgtcgtaggtcgttataaagcagtaatcagaactatatcaggcgtgtattcatcagagactaaaaaggatgccgatttcgttcgggcaacggaattgtgcgaaaaattcgctaaaaaggaaggtcgccaacctcgtattatgatagcgaagatgggacaagacggtcatgaccgtggggccaaagtggtagctaccggatatgccgattgtggctttgacgtggatatgggacctttgttccaaactccggcggaagctgcgcgtcaggctgtcgaaaacgacgtacatgtgttgggcgtttcttctttggctgccggccataagactttggttcctcaggtaatcgaagagttgaagaaattgggtcgcgaggatattgtggtaattgccggtggagttattcccgcacaggattatgacttcctttacaaagccggtgtagccgctatctttggcccgggtacttcggtagccaaagctgcgtgccagatactcgaaattcttctcgatgagtaattttggaaaaggataatgtgttgaagcccggcagtaataaactgccgggcttttttgataataatatattgttataaaaatgtttaaaaataattgtctatgatttgaaaaatatattaatttgtaagaccaatttatttcttaatcttgatatatatgaaaaattatttgttcccttttagtttcttattgtttagtttgggcattcaggctgagaagccgcagtggggtattcccgatacgataagtcattatccgataggtcccggagctgtgtatactcatatcgagtttacacaaaagccgatacagttacatcaaattacattggatttgaataacgaatataatgcggtagaggtatatccgtctaacgggaagactccggatgcctcacgggagacaacgtcatcgcagtgtaagagtaactcttatgaaggacaccgggcgtttttcggggtaaatcacgatttatttcattatacggggcagactacggctgcggggatcaatgtacgtaacggagaagttgtcagtcattacggcgattatggtcgttctgtcatgtctattagcaaagataaggtggcagaggttttccctcctaaatattcggcaaaggtaatttgtccagaccaaacagaaataacgatcgacaatgtgaacgagtcggcatacggaatacaatcatacagaaattgcgtattgttcaatacgtatagcagtcttactcttacggaagacggtttatatgtgaaaataacgccgcaaggggaatggattattaacggtaactcgactccttgtcgggtggaggctatggagcatacccctatacaacccgatggaaaaagtcatattttgtttatgagaaaccatgcgtcggagcagttcgaggataaagtaaaagtaggcgatgtcgtttatatcgaccagcggtttgtgaatacgacgtttcccaattccggcatatccgttccaccggcacaaaacgttgtacaagcgttgcatggttggccgagcgtgatattgaacggagaacttcacgataaagagtacaacgattttgtcactcccggacgtgagttccaagactatccttgtacattggtggggataacgaaagacgggaaaagattgtttatcattaccgccgacaaggcctctatggttgagaatgcttattatttagtagagcaaggagcttggaatgtcgttaattttgacggtgggggatcggctactatggttgtttgtgacgaagtggtaaatactcctaccgatggaaaagagagggctgtgatggattcgtttcaaggtatttcgttagctccggttgacagtacgttttctttcgtttctttttctaaaccttctgtgcaggctatacctttgtcggtggttcctttgagggtattggctcataaccgttatggcgagattatcgacgatgattttaaagatgttacttattcgtgcgaaccggaggaattgggatatgtgaatagtcgtggcgagttttgtgcgggagctgtttctatgttaggaacgattacggctcggaaaggtgactctgcatgtaaaatacgggtcgttatgggtaatgccggcaagtcggttaaattatgtgccgatagtctttatattgacgatattagagaatatccgatagagatcgagaccgaatcggacggaaagaaatatatggtaaatcctgctatttttgactggcaatctgtgggaacggattgttgtgatgtagtggacggtgtcgtgagaggtgtcacgaacgggcgaactgtgttgcaagggaaatatggagatgtagaaattcagttaccggttattgttgaaattggagtgggagagaaggtgcatgaacatttttctgatggagcttctttttctgtaaccggtagttctgctataaccgacattcgtttcgattcgtctgtccttcctgtgggttggagtgacggtactactctgttgttcgatttatccaccgggcgtgctcctaatattatgttggataagccgatacgtttcttcgggttacccgattcgatttcgatacaggtgaaaaattggggcgctttaatcaataatatttcctatgaattttcttgttctactggttcttggagccgtatcattaatccggatgccgatagcgattctgtttatacagtgtcttttgccgatttagatgtaacggctttcccggtggtgttgaatggtatgaagatatacttgtcgacacagataaagggaccgaatcagaaaatttcatttagggatttgaaggcttattaccctcatgaagcacccgatgggataaaagaggtaaaatgcggatctgatttttcgataagtaagattgatccgggagtaataaggatacaaggtatatcggaaggagaagatattgttattactttgtcggatatgaacgggagactgctggaaactttctgcgataaggctgtggattgtggtgtttgtgacatagagttaccgttcgtattacctccgggtgtatatttggtgggaatacagacgaaaagcggtcgtgtagtggaaaaacttgcatggtaatgagaagcgaaccccgaatttttcggggttctttatttaggattctttcgagagaaggctatctgtattttttaagagtgttttgatcattcggaggaatacaaaacttttttcataaattaagaataccgtatttttttctttgttttatttttattagtatctttattcgcttttataaacatgattgtctatgaataaaaattttatctcattgtgcgccggtattttattgggtgtatctccgctttttgccgtaccggccaagcctgtccttgttagggtcgctcaaccggacgggaccgttgtaaccgttaaaaccgtaggtgatgaattttatcattacaagtctacttccgatggcattccggtagtacgtggcgaagatggtttctatcgttatgccgagttgtctgcaacgggactggttgttgccggcaatgtgatagcccgcgattcgtcgatgaggagtgtttcggataaggcgtatttaacatcgctgtccgagaagaagatttcacagaaactttttagtcgtcgtaatctacggaagcaacaactacaaaacaatataactcgtcgggttacgcaggctactgccggtgacgatgtgcacggtttggtcttgttggttcagttcagcgataagaaattcagttcggtggggacacagcaggcttttgacgagatgatgaataaggaaggatatgattatatgggagccatcggtagcgctcgggattattttatttctcaatcgggaggactttttcaaccgacattcgatgtggtagggcctatcactctcgacaatacgatggcttattatggggctaatgattattccgggcaagacgtacgtcccgatgagatggttatcgatgcttgtaagaaagccgaatcgatggtcgatttcacgatatatgacagagacaatgatggattcgtcgatttggtgtatgtgatttatgccggatatggagaatcctcggatatagacggttctttggaagatgcgatttggcctcatgcttggtatatttatcaaggtgcgcaaaagcgagtatcggtcgacggtaaatatctcgatgcttatgcttgttcggccgagctgttggggaacagtggtactactcgggacggaatcggtacattttgccatgaatatagccatacgttgggactccccgatttttacgatacgagcggtgtgacttcgaattatggaatgggcacgtggagtttgatggattatggctgttataatggccctgattccgatggcgacggttattccgatggttctgttccggtcgggtacacagcatacgaacgggagttttgcggttggataactatcgaagagctgacggctccttcttcggttacactggaaaatctggccgatagcaagaaggcctataagatagtatcgagcgataaagatcaatattttacattggaaaataggcaacagacaggttgggatcgatatatggcatcggccgggctgatgatcgtgaaagtcgattacgatcagtccgtttgggattataatacggttaacaacgaatcgagccgccaacgcatgaccattatgccggctgacaataaatatagcgagtataatgaagatggtgacttatatccctataatggtaatacttcttttaccgatgacagtcgcccagctgcaaagacaaataccggattgaagttgggaaaacctgtaaccaatatcgaacaggataatggtgtgattacgttcgactttatgggaggaaccccggcagtggttgctcccgtggccgatgtcgctactcatgtgacaacaaccggatttaccgcaaactggtcgtcggtagagaatgctgtcagctatacgttgcaggtcgatagaaaacaaccgtcggccggtggcgaaattttactgtcggaagatttctcgaattgcacggctgacgagactacaaatatcgcgggaacgactacattcggaaatgcgaaggacggttatttccaaacttcgggttggagtggtaagtatttgttcccgaacataggaaagatgaaactaggtaattcggataatgggggagctgtatgtactccggctattgatttatcttcttgcgacggagtatttactgtccagttcgatgcctctatgttcgatggaagcaaagagaaaagtgttgtgataaaggtatatgtcgaaggagatgagtcgaatgctcaatcgaccgaaattctttcgaccagtaagatgaatacttacacaatgacttttacaggtggtacagccgatagtaaaatcgtgctgatgtcgacagcgagcagtggaaaaaagagggcttatctcgataatatcgttgtatatagcggtgaagttttacctgagatggcttctaaacaagctgttagcgatgtttggcctctgattgtgacgggaattacggatacatcgtatcagctcgttgacttggagccggggtatgtgtattcttataaagtaaaagctgtgaccgcagagggggaagaaagtgactattccaatgtggtgaaggtggatttatctaccggtatttgcgatttgccggagtcgcacaatcgagtgtatactgataacggttatattgtggtcgagtgtgaaacgtcacagccggtcgaggtcgttaatttgacaggtcagattgtcgtatctgcatccgtgaatggacgttctttgttattggttccggttaggggtgtatatgtcgtgcgctgtggtacatcggtaactcgtgtggttgtgaaatgatggtatttatataataaagaaaagaccgaagcgaatgtaaatgggcttcggtctttttttatggtctatatataaaagtttttgagaacttaaatttttacttttcgatcgttcagccgactttcttcggctttgaatcccataatatggctttcgactgaaacacttatggggctagacagatagtcgcggttatcgttcccgacagcgtttataaaatcgcgaaccaaacacaagtctccaccgccgtgcccgtgtccgacgtaacttttcacttcttctactttggcatcccatatgcgctgtttcccactgcggaaatcggttacggtaaatgttgtcatatcacctacgatttctccttttgtacccattatttgagtccttcttcctcctttggccatgaatgcctccatagagaaattggctgtaacaccattttcaaattccatgctggtcacgtagtggtcgcattggtcattgtccatttggaacacgcagcgtccgtagtcggtagtccgtatcactttacgtattgcctcgttttgaaggctgcgttctttgggcaggtcgaatgcatatatatgttttcgttttttcaaataaatgtctaatgcagaataggggcattcattttcatgcggacaatctaaacaacgttcggtagcaccttgcggcatattcttccgcttgaaataggttaaagagccgtaggccgaaatggatttgcatggagagccgaccagccatctgataatgtcgaggtcgtggcaggattttgccaaaataatgggggtggtttcctttgaattatgccagttgcctcttacataagagtgcgccatgtgtgcgtattgtatgggttcgagatgttgtatactaatcagttgccctatgtcacccgaatcgatgatttgtttgagagcgatgaaatagggtgcgtatcgtaatacatggcagactcctacaatggcattttttttgatcgctaaatctcgaatgtccgtacattctttttcagtaggtgctatgggtttttcgagtaagatgtgatatcccatcgaaagcgctttcatacaaggatcataatgtagattgtcgggtagactaatgataacggcatctgcgaattttgttttattcaaggcttctttccaatcggtaaatctgttttcttccgggacatcgtggtcttcggccatagattttagccgaaattgatttttatcggcgactcctactattttcatgcaatcggggtactttttcgcatatccggcgtaaacgcttcctctgttacccgcaccaaggacaagaaatgttaccggccgatttacattggctttcaggtcttttatgtcggtggcgattcgagatacattgtttgtctgttttccgttggctaaaatagaaggagcaaaagctgcaccgacagcggtaagccccattacttttaaaaattccgagcgtttcatgatttagatttgattttcaaaatttctacaaatatataaaagagaaaaatacgaaacaatttatatgtttaatattttcgatttatatatatattgcttcgattcatttcttatgagattgtaatggtgttttttttgatcttgtttgtgtgagagaagttgaatgattacatttgtttgttcaatattggcatgtatggggagcgatgagttgaaggcatttttgacggctttgtcgggtagggatatgaaaattcgaattgcagaatttttacagcaggaggattgtatcgccgaagcaatggatatagctgtgggggaatctggttcagaggcatttcgtgcagcatggggtatctctgcaatatacgaaacgaaccgcctttgttttttacgatataaagataagttcgtttcggatttttgtcgtgtcaaccaccacggggtaagaagagaatatggccgtataatgttgagtatgttgaaacataaggagtatattccagataggcattctgctgaaaatttggccgaaatagtctgttcgtggagtattgacccgaagataacgatatcggaaaaagtgtggactttttcgatattgaaatttttatcccggtggatagaatggggtgaagatatgttacaacaattggaggctctatgtgaaactgatatgtcgccgggaatgagggccttaatgcgtcgattgcgcaaatagtttaaaatagcttaaatgttttttattcatctcgtgaacactttgcctagtattacatttgtataatagaacctaaggcataaaggagatttatatgaagaagttatggggttgtatattggtatttgctgtgttgctgacgggatgccgatcggcttcggtactctcgttcgatgtgtggcgaccggcaaaagtcacttttccggcggatatcgtgcgggtaactgtcgttaataattcggcagagcctaacgaaaaagaggggaataaatataaggatatttcgggtaaggaatatacgttggtcgtaccgcatgacagcacgacttatcgtttggcggaatatatagcattagagctttctgatgcacattatttccctgagattacaattttttatgacgactctataaccttgcctaaaagtttgtatcctcttttgtcggaaaatcaactttcgattgtaaggggaggggccgataatacagcggtcgtgtctctcgataaaaccgatatggtagtaaatatggaggatcacactttgttaggttcttccggagagactgtctttgttacagacttatcggtagccacgactttgaatttacgtgtatattggccgaacaagatagaaccttcttccgaaatggttacggatacgttatattggcaatctttcggatatacgccagatgatgctcatagttcattgcctctgaccgctgagtttattcaagaggcgatgaggcagatttctgcacgggtaagagaattgtttattcctcatgtagacaatgtcaatcgttatatttatacatctaccaatccggcgatggatgatgcttatgatttttggcagcagaaaaaatacaaagaggcttcttatttgtgggaatatgtttatgaagaacagaaaaatgaaactacccgagctatggcagcagccaatttggctgtgtataatgagctgttcgataattataaagtcgctattgaatgggtagataaatcactttccttatttgaaaagagggtggatagtaacgcttctgatataactgctttacgggattatcgtcggcaattgatggaacggaagtctgataattctttgttgcagaaacagatgtagaggcaaagattgggaagccctctattttcttgcatcttcatcaccaaataaaggtgatgtttttgggagtggagtttttgtttgtattaaccccctcgccctgcgggcactccccctatattttgctgcgaagtacggcagggggagagagggttaaaaagcatttctaatatttttagactcctccattgctgtgcctcgtagcattacggggtgtggcgttagctatataggggaggtgtcacaaagtgacggaggggttgaaaacgccatcgtatcagtgtttatactggatatatccctttcttccctgacgtgtcccatagcattacggagaactgtgttagccatatagggaaatatacacgaacaatctccgttaattatcgactgagcccccaataggtccatgctaacttgtaataaaaaaacgtccaaattttatttggacgttttttataaatatttatgggcatgttagccttgtatggcagctatacccggtaaagttttgccttcgatggcttcgagtagagctccacctccggtcgatacatatgaaactttatcggccaatccgaatttatttacgcaagccacagagtcgcccccgcctacgagagagaatgctccgtttttagttgcttctacaatggcttctgcaacagcacgggaacctgatgtaaaattatcgaattcgaatactcctgtcggaccgttccacagaatagttttcgatttcttgattacgtcggcgaacagagcttcggatttaggaccgatgtccataccttcccaaccatcgggtattttatcgacatcacagaagtcggtattggcatcgttcgagaaatcgtcggcgatcttggcatcgactgctaaaaccaaatttacatgattggctttggccttgttgatgagttcgagagctaaatcgagtttgtcgtcttcacagatggagttaccgattttaccgcccaatgctttggtaaaagtataggtcataccaccggcgataatcaagttatctactttggtcaatagattttcaataatatcgattttcgaagaaactttcgaaccacccataatggccgtgaaaggacgaaccatctctttcattactttatcgacggcggcaacttctttacccatgaggtatccgaacattttgttttcgggagagaagtattctgccatcaaggccgtagaggcatgagtacgatgtgctgtaccgaaggcatcgtttacataaacatctgccaagtcggcgagttctttcgtaaattctttttggctggctttgatcgcttttttagcagcagctttttcttcgtcgctggcatcttcggccaatcctctgggctttccttcctcttcggcatggaaacgcaagttttcgagaagaagaacttctccgggttttaatgcggctacggctgcttttactttatcgccaacacattcatctacgaattttacttcggttccgagcaattcgctcaaatgtgcaacgatatgacgcaaagagaatttgtcttctggaccttttttggggcgtcccaagtgagaaccgatgatgaggctaccgccatcggccaatatttttttcagtgtaggtaatgcttttaccatacgggtgtcgtcggtgatattaaagttctcgtcgagaggaacgttaaaatctacgcggacaaatgcttttttaccagcaaaattgtaattgtcaagtgtttgcatatcgtttaatatttagtatgtaactcttttactctttggcaaatttagataaaaatcgattatctttttactattaaatgctattttctctaaaaatcaaagtagtccctttgcgtgcaatagatgttccatttcatattgtacttttagagcttcttcccgggcagcttctgcgaatttctcgtctgtggcagcatagatgatctttcgggaagagttgacgagtaaaccgcattcgcggttcatgccgtatcgagccacttcttcgaggcttccaccctgcgctcctacacccggaactaaaaggaaattatgcggagctatacggcgtacgtcctcgaatagttttccttgtgtcgctccgacgacaaacatcaactgttcgtctgaggcccaattttgagccgtgcgtattactttttcaaatagccgttcgccgtaagaatctgctgtcaattggaagtcataagatcctttattcgaagtaagtccgagcagaatgacccacttgtcgggatagccgagaaagggtttcacgctgtcttctcccatgtagggggctacggtcacggcatctaaatcgaggtggcagaagaagctacgagcatatagctccgatgtgtttcctatgtcgccacgtttggcatcggcgatgataaattggtcggggtaattttcccgaatataatttactgtcttttcaaaagcggcccatccttgcattcctaagctctcgtaaaaagccagattgggcttataggccacgcaaagatcggccgtagcatcgataatagctttgttaaaagcaaaaatggggtcttcttcttgtttcaagtgagacggtatcttttccatatcggtatccagaccaatgcaaaggaaagattttttccgtttgatattttcaaataattgtttcttgttcatgatatatgtggattatagttcgctctcttttaatcgttctgcattctctgccacgattaaatggtctatacaatcttgtatgtctccattcatgaaggcaggtaagttatagatcgtataattgatacgatggtcggtgatacgtccctgaggataattgtaggtgcggattttggccgaccggtctccggtagataccattgttttacgcctgctggcgatgtcgtctatgtatttctggtgttctttgtcgtagatgaacgagcgtagacgagagagtgcccgttctttgtttttaggttggtcgcgggtttcggtgcattcgataagaatttcttcggagacaccggtgttgggattcttccaaatataccttaaccgtacacccgattctactttattgacgttttggcctccggctccgctcgaccggaaagtatcccattttatttctccttcgtttatttcgacatcgaattcttcggcttcgggcaatacagccactgttgccgcagaggtgtgcacgcggccttgtgtctcggtggcagggactctttgtactcggtgtactcccgattcatatttgagtgtgccgtatacattatcgcccgatactgtgaaaatgatttctttatatccgccggacgctccctcgctgtaactgctgacttcggctttccaacctttggtttcgcaatatttagcatacatgcggaataagtctcccgcgaaaatggctgcttcgtctccacctgttcctccccgtatttctacgatggcatttttgctatcttcggggtcggcaggaaccaacagtaattttatttcttcttcgagttgcggcaattgtgacgtgcaagaatcgagttcctcctttgccatatccctcatttcgggatcgttttcggtttcgagtaatcggcgagattcttctattccgttaagtatttgtttgtatcgtttggctgcctccgatattttttcgaggtcacgatattctttggtgagttttacaaaccttttcatatcgccgataacggcagggtcagtaatcaaagttcctatttcttcgaatcggataagcagtccttccaacttttccaatagtgtagtctgttcgctcattcggcctatttttgcttttgggcaaagataagaaatttcgcccgatttattttaacagaaggattgaaaaagatggctcggcatagaacgatagtttttgaaaccaagtctgtgccgagccaccccacatacagagtagtagtttaggtattaaacatacttatctatataatgtttgatgtttatccttgcttaacgtggtttaactataaaaatagccgagaaaggtactcggctatttttatagactaaaaccaacggacgtaggccaaatcttgacgatgtggcaggtctggatttttgggatacattcggaatgaatagcggaagacccctgaatcgttaagttggtattgtattttataagttactttcgttccatcggtttgaaccggttccatttcgagtgtcttgtatggctcggtgttaccttcttctacattggctatgactagttctacacccaaacagttgcccagtcctttattatccaaaacgacagacatttcgtattcttcacctacgtgcggattataaagcaatccgtcgggtatggatacggaacagatctcgatatcgttccatttggatacaaattcttctttccaagctgcgatttctttggctttggcgaattggtcggcttttagtaatcgggtacgtttgccttctttcagatagaaccggtcgatataatcgtgcagcatgcgttccatcgtgaactctggtgcaatcttcgcgatggaattcttgatgtattgtatccattccggggaatatcctttgctgttttttgcgaaatagaggggtactatttgattttcgagcatggaatagattgtcgccgcatcgagttgatcttgttggttttggtcttggaaagttcttttatcggtaagtgcccagccggctccttctttgtatccttcgtaccaccagccgtctaatacggagaagttgagtactccgttcatttcggctttctcgcccgatgtaccggaggcttccaatggacgggtaggggtatttaaccaaatatcgacaccggaaataagccgtttggcgactttcatgtcgtaattttcgaggaaaataattttaccgaggaattcgggcatacgggaaatttccacaattctttttatcaaaccctgtccggctccgtcggcggggtgagctttccccgagaagataaattgtaccggataattggggttgttgactatttttgagagtcgttcaaggtctgtgaataacaggtgtgctcttttataagtggcgaaacgacgggcaaaaccgatcagtaaagcattcggattgattttttcgagaaccgaaacaatacgggaagggtctccttgattcttcaaccaagtttcacgaaaatcgtctttgacgaatttaacgaatttattttttaaagtttgtctgatgttccagatgatttcgtcgtccacttcgtaaatcttttcccacattttgggatcggattgatgggacatgaattcgggaccgaaagtcttaacatagaattctttccattccgaagcagcccacgtgggcatgtgtacaccgttggtgacatatccgacatgcaattcgtcggggctatatcctttccaaatgggctggaacattttctgtgaaactttaccgtgcaaccagcttaccccgtttacttcttgacaagaattgcaagcgaatacactcattgagaatttttcgtttgtatcgggattttctcgtcccatattcatcaggtctttccactctatccctaatttggccggaaattctcccatgtatttcccgaaaagagattcatcgaaatagtcatgacctgcgggaacaggggtgtgtacggtataaagagaagacgaccgtactacttcgagagcttcgttaaattttaagtggtcgttttgtacgtagtctaccaatctctgtacgttcagtaatgccgcatggccttcgttacaatggtataggtcggttttgattcccaatttattcaacattaagataccgccgattcctagcaaatattcttgtttcatgcggttttcccagtcgccgccgtagagctggtaagtgataggacgatcccattcgctattcgtatcgaggtcggtgtcgagcaggtataatttgattcgaccgacatttactctccaaatgtgggcatagacgattcgtcccgggtagggaacttcgagaaccatcggtttgccgtcttgttcggttaattgctcgatgggtagttgattgaaattctgggcttcatagttggcgatttgctgcccgtccattgacagagtttgagtgaaatatccgtatcggtataggaatcctacggctgtcatatcgatattactgtcacttgcttcttttaagtagtctcctgctaagatacctaaccctcccgaatagattttcaaaacgtggctcaatccatactccatactgaaataagaaatggaaggaacgtctttgcgtttttctacttgtagatatttctcgaacttgtcatacacatcttgaatgttgcgcatgatttgtttgtctttggttatttcttcgagcttttcgtaaccaatgcgttgtaggaataaaacggggttttcatgaaccgatttccataaatctttatcgatcgatttgaaaaggtttatggcttcattattccatgaccaccataagtttttagctaatatttctaagcatttcaaatctgtcgggacttgtgatttaacagttatatcccgccaattaggagtgtttgtattgcttacttgtactttcataattgaaatatattataagtttattattttcgtaatgctgcttttttcagagccaagtggaatgcttgtgtataatattctataaaatgtttccattcggcttcaagtgaaacgtttgtggccgcttggcctatttttgctcgttgagctttcccgcagtggctgagggcgaggatagagtcggctaaatcttccgatacttctacaaaattcaaatctccccgatgcaaaacttttacacccgatttctctaaaccctgttcctttcggctgtttatccattgcccgaaccctgataaatcggtagtgatcgtgggtattccgaacgcaatgctttccaaaggtgtatatccccacggttcgtaatatgatggaaaagccgtagcatctaatcctattaacaaatcgtagtacgaaaggttggcaattccgtcttttccggtgaggtaggacggcaggaagataactttcaatcggcttccagcttcgttatctaaatttaaataatgtatctgattaaccacactgtcttgatcgtaattgtgaagcgtgtgggtgatgaagggagcgggaaggggcgttgcctcataggtagcggattgaagcctattttgtaagtcaattctcggaccttccacccaagccgggactaaaataaacgctactatttctctttctaaatcaggactttttgagactcttttaaccgcatcgataaagaggtctatccctttgtttttatattcgtaacgtcccgatgtggcgatcaagaaagcattttttttcggtcgctcccctgtcaatgcttcgacaatatcacataaccgtttacgggataggttacgttttgttgagtatgattcttccgccggaacaaaatccctctcaaatccattcggggtgacgatgtcgggtgttcgttctagtaattgagaacattcttttgccgtaatgtcgcttactgttgtgaaacaatctgcttcgtgggctgcacttttttctaaggagtgtttcgataccatgttcaactcttcggccatctgatctccgttgtaaccggctaaatagtcatatagaggtttcccatttcctgcaatagaacgaccgatagatgtcgcatgagttgtgaaaagcgtcgcgatttgcggtaaagtgtactttacgtgaagtagtcccatacctgtggtccattcgtcgaaatgggcgacgaccttaaatttttcaccctgtatgaacttgtaaaaactttcgataaccacagccgacgcataggagaatatacacgattcgtcatagtctccgtaagctggtaaagagtttaccccataccggttccacatttcaccatataaatcgtttttataaggatataatgatttgaaatcgactaatatgacgataggtctgcccggtatatcccaccgacctatctttactttcatattttggggtaaagaggcttgtttatgccagtctttcagaagagttttggatctgataaaatagggacacggtttatctccccagatatccggtcctatgaaaataattctatctttatatagtttttggagcgttcttgcttttgtggaaagaacggtatatatgccgcccactttattgcaaacctcccaacttacttcaaatatataatcaggtataagttgcttttccatgattactataataatattatactattgttttgcaatagagcgaacaaagttacaacaaatattttgtaactcagtgataaaaaatgttttttagaatcgtgcgatttgtcatatttagtgaattgagattgtatatttcttaggtaaaaaagagaatctttttgggaaacttcgagaaataggattatatttgtctgacaaacttaaaaagaaaaagttatggctaataaaagaactttgaagaaagagattaattacgttgccggagaattgttatcggaatgtctgtgtaataaatatcttataccgggtactgatgccgaaaaggtagatgcattgatgggaaagattatcggtatccaagatgattttttatgtcgagtaggggctaatggagataaagatcccaagaaagtaaaagtttattaccgaaagctccgtgctgacttcgataaagcaatagatgagatttttgaagatttggcgtctctaaatgcttgataaataatatgaagagggcaatcagctcttttatattaagacttttcgggtggacggtggaggttgatgtccccgattatccgaagtgtgttatctgtgtggctccccataccagtaattgggactttttcatagggaaattggcttatctttctatcggccgttacgctggattcatgatgaaaaaagagtggtttttccctcctttgggaagtcttttgacgtcgatgggcggggttcctgtaagtagggataggcataccgatatggtgtcgcaacttgttgagattttcaaatctcgaaagcgtttttccatagcgataaccccagaggctacccgcaaggcgaatgccgattggaagaaaggcttttattatatagcgagagatgccgaggttcctattgtattggcctatatcgattataaggataaggaggtgggcataaagaaagtttttatgccgacgggagatgtggaaaaagacatgcgcatgataaagtcttattataaaagttttcacgcacgacgacccgaaaattttgttaccggattgtagtatttatatataaggggcagaattcgtttattctgcccttttttagtttcagtagtatgggtgatgttttgagagtttcgttgatacagaccgatattgtttgggaggataaaagagctaatttagacaagtatgccgcaatcctttcccatataacgggagactgcgatttggtggtttttcccgagatgtttacgaccggtttttccatgcgtgtggaagatttggcagagtgtatcgatggagaaactattaccgaggtaaagaaatggtctcgaaattataatgtggcgatagctggtagttttattgctcgggctggtaatgtttgttttaataggggattttttatcgagcccgatggatcggaacactattatgataagagacatttattccgaatgggagaagaaggtcgtcattttgtctcagggtcggaaaaacttatagtaaattatagaggctggaatatttgtttgctcgtttgttatgatttgcgttttcccgtttggtgtagaaatgtagggaatgaatatgatttgctgttatttgtggcaaattggcctcaatcccgttcgtatgcttggagaaatttgttaatagcccgggctatcgaaaatgcggcttatgtttgtggcgtgaacagaatcgggcaagatgaaacatcgatggtttatagaggagatacgatggcaataggggttaaaggcgaagttatcgcagaatcagaaccgtttgtgccacaagttgtaaatgtagaattggatttatctaaattaaagtcttttcgggaaaagttcccggtttggaaagatgccgatgaatttgtgttgaaaaaataatgaattatttttttaatacaaaaaaagaaaggcagagactctcccgagccactgccagaattatcgtgtgtaatttatgaaagctgaatagaggttttactcctttttatgtcgttgtttacattcccaaatagtacctttgttttctgcattttcaaaaaacttttttacggcttctcgtttgggcggaggcatcagccctccgaattttaaacaaacgttaccttcttggtcgtaaacgacggtcgtgtttttgtcgaacgctccgggagtagtcgcaaaaacggcgtaatagtttttcccgtctttttcataaagagttatttggcattctcttttctcgaattcctttttacgttttttcagccacgatatttcatcgaccggattgttgtgttttggggttcgttccacaatatatttattaccggtacaggacaatagcaatagcccgcaaaagacgagaatgaggtatcgagggtttttcataatgttttttatgccttataacgtatccactttatcatttctttgtagctgggctttttgccatacatgaggattcccacccggtatattcttccggctacccacgccagcccgatggcagaaccgtagaggataatcatcgatactatcagctcccatgtagataccccgaaggggattcttaccatcattacgatgggggaggtaaacggtatcatcgaacaccacatggctaacggtccgtcgggattctcggcactgaatatgcctgcatatagggcgaaaatgataataaaggtaatgggaaccataaattgttgcgtatccgactcattatcgactgccgatcctatggctgcgaataaggaagcatacagaatataacctccgataaagaataatacgaaacatatgagcaactgggtgagattgatacttcccagcatgttttggatttcttgcatggctcccatttttcctgtgagttgagctgcatctacaccgttcatgctccctgcgacggcggtcatgttttcgatattggccgtatccataccaccgctaaaagagaaaatcgctcccgcagacaaaaatatcccgatgataaaaagaatccaaatgcccagttgggtgaggcctaccagtccgatactggtgattttgccgatcatcagctcgaaaggttttaccgatgaaaccattacttccacaattcggttggttttttcctgcatgacactcgacatgacttggcctccgtagagcatgagaaacatatatataatcaatgtcatggccataccgataaccatgaccatttctgatgaggtttgtgtttcggcgccgtcttcttccaagcgtatagtgtcgacatgtaggtttatgtcggaatcatctatgatttgtttgatattaggaatattatatgacaataatttttcgtttttcaaaaactcttccatttgcgacgtgatcatcgactcgcagctgttcgttatttgtttttgagagtagatggtcatacctttgggattgttcaatagattatctttgatgatgacataagcatagggttgggattcttcggcccgcatttccgccgggttgagtattccctgcgtataggtgaactggtattcttcggagttttcgtaaatattcttgtaaagaccggtttggtctataatggctatttgtctgacttcatcgctcgatagttgtgcgagccaaataggtgcgaatatcaaggcgaccatgacaatcggtgagagtatcgtcattaagatgaacgattttttttggacgcgagtcagatattcacgttctataataagagatattttactcataatattcagatttacttgatgtttgtattttctttaagtgccgattctcccacggtttcaataaaaatttcgttcatggtgggcagaatctcttcaaatcccgataactggcattgttgcgtgagcagggagatgagttcgttgttgctcatttgggtatttcgtttgcgcagtgtatatgtaaaattggcatgtcgttcttttgtctccaatatttcatatagatcgttgctttgcagattcccttgttgtacttcgattttgaagagatgttttttgtgctgttcgcgaatattgtttatttcgccttgtaagacgacatgcgaacgattgatgaggctgatctcgtcgcagagctcttcgacagatcccatattgtgggtagagaatatgatcgtagcgcctttgtctctcatttcgagaatttcttgtttcaacagattggcattgacggggtcgaaaccactgaacggctcgtcaaaaatcagcagtttggggttatgcataacggtagtgataaattgtatcttctgttgcataccttttgagagctcttctatttttttcttttcccaaccttttatgtcgaatttgttcagccaatatttcatgccttctttggcatcgtttttcgataatcctttcaattgagccaagtataaaatctgttctcctaccttcatctttttgtagagtccacgttcttcaggtaagtaaccgatgtgttccacatctgaggggtgtaaagggcgcccttttattaaaacttcgccttcgtcgggtgctgtaatttggttgataatgcggattaacgttgttttcccggctccattggggcctaataagccgtaaatgccgttttcgggaacatgtacggtaacattgtcgagagcccgatgagaagcatattgtttaacaatgtggttggcttcgaggtaatacatagctttaatttgaataataggtgtgttattgacggaacaaaggaatatataaaattttaattatacaataaaaatgataaaattttattgtttctcgataaataaatattgaattgtatatattatttaggcgaaataatgcgatctcctatttgtttggccaaagtggttctcaattgatttaattcgacattctgttccattagttcgattatcttttcattatctttattttgtgtggcttcttttatttttttctgtatttgtttgatagtctgttcgagaatagcattttttaattcataaatagctcgcggaatgagttcccacagcctgtcggattcggtctctactttttgatatttggtgtgtactttactcaattggtatttatcgctgactaaatctacggctaataaacttatttgagtgtcggggtaggtcgtaaaataacgttcgagaaaattgctttcgaaggtttgtaactcttcttccatttgccgggttatattttctcgcgcttcggcttcttttctttgtttgtcggtaatatcgccgttttctaagcgaatttgttcgattatctcatttatttggtcttgggctttcggcaatagctcttgtcgcaaagaagagacttgctgcacaacgtgttcgcgctgttgggaagccagttctagaatatgtttatagagagggttgttgaatacgatattatcgatcgcgagttcttcgacaatatactcccatactttttgccaagtacctgtggccgtttcgaataagtcacggtaaccatatcgtacgacgtaacggattaattcccgttcatatttgtctaagggtgatctgtttcctctttttgacgataaaggggtagggagggagatatttttatctgtttccggtatttctgatgaggccggtggtacaacctctgcgtcggagacttgatttacagatacattatttccaaaagagtcctgaataacagacggtcttaccgtctgcgattggggagattggtatcggtctcgggtaaattgctgttctgcccgttgttgtcgcattttgttcaattcgaacaaaaggacatgttcgtcgatttgtaataaccgactgcattcttgcacgtaaaccgatcttacgatggtatcgggtatgagcgaaatgctttgtacgatattcgagatgatacccgcccgttttatagggtcttctccggcatcttccaataacaattgggttttgaatcggataaagtccgtttcatgtgattttatatattgggtaaatgattcggcgctttggcttttggagaaagagtcggggtcttcgccatcgggaagtaagacgaccttgatgttaagtccctcttgaagtatcaggtctatacctcgcagtgacgcttttatgcccggagcatcaccgtcgtatagaactgtgatgttttcggtaaatcgatgtatcaatcgtatttgtccgggtgtcaatgcggttcctgaggaggctacgacattttcaatgccggattgatgcatggataatacgtcggtatacccttctaccagataacagcatttctctttttcgatagctcgtttggcttggaaaataccatatagttcattgctcttgtgataaatgtccgattcgggagaattgaaatatttactgatttttacacccgatttgagtattcggcctccgaatgcgacgactttccccgacacactgtataccggaaacatcactcttccggcaaacaggtcgtaaatacggttgttttgaccttcacggcaaagccctgtttttaataaataatcggttttgtaaccttgtttattagcttcttgtgcaagtgcatctcgcttttcaggagagtagcccaatccgaattttcgaataatatcttcattgaagcctctttctctgaaataggctagccccacggtgcgcccctcttcggtttctaatagcgatttgctgaaaaaattttgagcgaaggcgttgatgataaacatgctttcgcggtcgcttcttttctgtttttcctcatcggtcaactctttctcatgaatttcgatattgtattttttcgctaaatatttcagcgcttcgtaatacgatagttgctcatgttccataatgaaatggatagcactacctcctttgccgcaactgaaacatttacaaacgcctttggattgagatacgctgaacgaaggggttttatcatcatgaaacggacacaacccccaataattagcgcctctcttacgtagacttacgaagtctgatactacctctacgatatcggtagcggccataattctatcgatggttgcttggtctatcattccttttttctttttctccacgaagatagttatttctttgcgataataattggggcgatttatatttttcaaacaggagtaaattatagaaacaaaatattttttattgaatgaattttgctaaaaatatttattaaataactaaataatgttattatttgaattttttcgatggagaaacttgctgtcgtattagaaaattcatacatttgcaatgtgtttttcatagtattagatttaaggttaatgaagattggttgtcgtgagacaacctttccttttttaaaccctttcgtttttctttattcctttgttgatatttaataggtgttgtcggtgtatacgaatagctggcgagagacgtatgttattcgttgtataagaagaattaggatttcaagaatccttatgcccctcgacttattttgtttttattgaatataaatatatattttttattataaagttgtactagttctttaatattattatatttgtaaagagtttattcaatggaagtaataattttaaagaaaacagtgtgaaaaaatttactttttgtgtggcctttgcggctttatcggtaagtgcagggctggctcggtcgccatttgtgttgagtgatgcagttcctgcggagtgcatgtcgatggaaaaggtggatatgcctatgatgaacagagctatctccaaaccggcttctgccttgaaatttgattttgtaaaagagaatcgaaaacatctgatgaaaaaagatgcacagattgcagcattgacagcaccggaagctctacctgcaacgaatgtatcggatgtcggatttgtagcgaactggaacacggtttccggggcgaattattattcggtacaaacttacaggcattttacgactacgcaagatgttgattatatttccttgtatgaggatttttattttgcagaagctgctccggaggagtttaccaattatcttgatggctatacctaccgtcggaactggattcttttgtatggaaagataggggatcagtctattatattccctcaaacttcttctaaggggcagactgaattgcaaactcgggagatggatcttagcggtgagggtgaaaatgaaactgtttatttcggtatcacggccgaaggtgctgtgggtgataaaatagggattggctattactatatagatgctgatgggaatgatcaatctatgtcattgggaacaattcctttcgaagagtcgactttggatgctatgtatgaggtagaagtgccgtcaagcgagtctgccggattttatttgtatactgttggggcaatgcagaatacaggcgatgtgaaattaaagacttttttggtatcgcgagatctcactgcgggtactgaatttatggaggtgtatgattatcgacgaactcccgagacttctgccactttctttaccatagaaaaagatatcgagacagaaggtgttgtcgatgagtttgcatatgctgtgatagctcttgatgtaaatatgcaaaccggaaatgttaatgacaactcagatccgtccgaaattattttcgttggtgaatccagcgctgttgagggattgaaggccagcagagaaaagatctttatacacgacaagttgcacgtcgtattggataaaccggaaacggtgagtgtatataatatggctggtgtattggttgcttcttatgaggggggcgaaggcgacaatgagttttcgttgtccgcttccggagtctatatcgtaaaggccggtaatacgattgccaaagtaatgaagtaagattgagtttgattaaatataaagaaaggcttcctgcgttacgggaagcctttctttatggtagatggtgtttagaattcccgggcacactcttgcagaatttccgaaagggtggggtgtgcatgtatcatttcttttaattgttctacggtcgtttctctgttcatgagggcagatatttcctgcactaaatcggctgcatgagctccgaatatatgtgctcctatgatttttccgttttcatcggttatgagtttgcacagaccgtcaggctctcccatactgatggcttttccattggctcggaacaaagtttttttagccgtgaacggtatgccgcgttgtttgcattcctcctcggtgagtcccaccataccggcttctggacgagtgaagacagccgcaggaatggtatcgagctttattctcttgtcgataccgagaatgtggtcgattactttgcggccttgaaaagatgcggcgtgggcaagcatgcaatgaccgtttacatctcctatggcatagatcccggggatattggttcggagcgtatcgtcggtttcgattcctttgggcgaatatcgtataccggcattatccagccctatgctctctactcttgggcttcgacctacggcaatcaggacgatgtcggcctcggtggagcattctttacctttgtgggtgtagtgcacgagcagttgtgctccgcttcgtttaatcgattcgacggcagcttggttgtaaaattcgataccccgtttggatagtacttgtttcagacgcttactgatgtcgctgtcgaagttgggaagaatttctttggcgtattcgagcatggtgaccgtgctgccgaaactacggaagatggaggcgaattcgagcccgatgactccggctccaatgatacacagtttttgggggatatggtcgatgtcgagcatttcggtcgaagtgagtacgccgggtaggtcacaaccttcgatcggaggtcttttggctgtcgagccggtagcgatgagtatgtgttcggcggtatatttctcacccgattccgatattaccgtatgtgcatcgaacagttcggcacgttcgggaatgtaggtgataagtttgtgcttcaatagaaattctatgcccaatgtcagttgggcgacaacttcgttttttcgttccatgatacgttggaaatcgatcgtcggggcagaaacatggaatccccatgtatcgcaatcggctattgtatcggctatttcggcactacggcaaaggcattttgtaggaatacagccttcgtgaagacaagttcccccggctttccgctgttcgaacaaggttacactcagcccctttttcgctgcatatacggcagtttcgtaacctccggggccggctccgatgatgatgacatcgctgttcatacttgaattttataaaaaatcggagaggagaaagagggttgtctctttctcggtctccgatagttgaatattatgattgtttttgtaaatctttgaatcgtaaaatcggatttttcgccgctgtggtttcgtcgagccttctcaccggagtggagtggggcgcgctttttaccaaatcggggttttcgatcgcttcgtgggcgaccgtgcgcatcacctctatgaactcgtcgagagtctctttcgattccgtttcggtcggttcgatcataatcgactgatggaacaacaaggggaaatagatcgtgggcgcatggtagccgtagtcgagcagtcgtttggcgatgtccaatgtagtcactcctgtggacttgtcgagtaatccgtcgaatacgaattcatgtttacagatgccttcgatgggcagatagtaacagtctttcagcgattcttttacgtagttcgcatttaatgtcgctaattctcccacgtgttttatctgttcttttcccagtgacaggatataggcgtatgctcgcatcatcactccgaagttcccgaagaatcccgaaatgcgccccatactgtcgcttcctccttcgatggagtatttgtcaccttttttaacgattcttgggctgggcaaataatcgacgagtgcaggggcaacgcctacgggaccactgccggggccgcctcctccgtgaggggtggaaaaggttttatgcaaattgatgtgcataatgtcgaaacccatgtcgccgggacggcaacgtcctaacaatggattgaggttcgctccgtcgtagtagagcaggcctccgcaaccatgtaccaattcggcaattttgggtatctctttctcgaaaatacccaatgtgttggggttggtcatcatgataccggctatcgtatcgtcgagcaacggttcaagtttcgtgacatctatcgtaccttcgggcgtggaaggaacttcgacaatctccaatccacacactgctgcactggcgggatttgtcccgtgggcactgtcggggacgattactttggtccgcttcaagtctcctcgcttgatgtggtattgtctcatcaacattagaccggtcaattcaccgtgggctccggcaaatggatttagtgtaaattctgccagacctgaaatctcggatagagcatgagccaattcgtaataaagacgtaaagccccttgtatggaattctcggattgtaatgggtgcaatgtcgtgaacgattccatagaagccatttcttcattgattttgggattgtatttcatcgtacaagaacccaatggatagaacccggtttcaactccgaaatttttattggaaacgttggtataatgacgcacgacatcaagttcgctcgcttcggggagtttggcctccgtctctctgcgcaaagattgcgggaggtcggctaaggaatagtttccgaagtcggattgttgcagggaataccctatgcgtcccggctttgaaatttcaaaaatcagcttatcgtagtatttcatggcttatccctccttttcgattaatgataccagattgtctatttcttcccgggtgcgtttttcggtcacgcagaataggagagcgtcgtcggttcccttgacaggaataccggccaagaagcctttttcttcgagatgtttcaggagtgtgtcccgattcaaggtcgtttttacggcaaactcttttaagaacggcttgtcgaaacagagcgaaaatttacccgtttccagcaatttgtcgcacaggtagtgcgctcccgcataggatttctcattgacttccttcattccttgttttcccattagagccatgtatatcgttacatacagagccataagggattggttggaacaaatgttgctgttcgccttttggcgacgaatatgttgttcccttgcctgtaaggtaagtacaaacgcccgtttaccgtccacatcggttgtggctccgacgatacgtcctggtaatttccgtactaaatcgcgggtggctgcgagataaccgacataagggcctccgaaattcaaaggcatccccaatgtctgtccatcgccgcaagcgatgtcggctccccattcgccgggcgttttcagcacggccatagccgaggggtcggcatagacgataaacaacgctttgtgtgcatgagcattgtcggcgaatccggaaaagtcttcgatgattccatagcggttcggggtacttgcaataacaccggccacatcgtcggcttcgagcagtttctccatgacggctttgtcggtgacaccttctttttcgggaatcatttccagatttaccccgtggaaacgggcgtaggtttcgataacctcgatgactctgggattcagtgtttgggaaacaatgactttattgcgtttcttggcatgggcaatcgacatgagcatggcttcggctgcggccgtagctccgtcgtacatggaagcattgcaacattccataccggtcagctcgcatatcatgctttgaaactcgaatatatattgtagtgttccctgagaaatttcgggctgatagggagtataggccgtgaggtattccgaacgggagataagttggccgataaccgcaggggcataatggtcgtaagcgccgcctccggcaaagggaatgagttttttgttcgtctttcctaattcccgaaagtagtttctgacttcatcttcggacatcgattttttcaaatcataatctttgtcgaagcgaatgttttcgggaatctcggcataaagctcatcgagagacgataaccctatcttccccagcatttcggaaatatcggcttcggtatgcgggaaatatttgtacatgatgtgttcctccgtcgattattcgcaaatggctttgtaggcttcggcattcatcagactgtccagttcggacttatcgttgattttaactttgcaaatccagttcccgaaagcatcttcgttcaataattcgggctcgtcttccagtttatcgttaatctccacgacgataccgctgatgggcgataacaggtcgctggcggcctttacgctttcgactgcaccgaactcttctccttgattcagttcgtcgtccacttcgggaagatcgacgtaaacgacattacctaattgatgttgtgcataatctgtgataccgatatatccaaattcgccttctacttttaaccattcgtgtgattcggagtaataaagtccgtctaatactgtactcataattatttgtttttaagttgtcaataaatcattttttataatttttttcgtagaagcgtttcttaacaaccgttcctttgaaaaattttttgcgaatgtgtatctccacttcggtccccaatgcggcgtgcgcactgtcgatgagagccatacatacacttttcccggtagagattgaattgtaacccgtggtgacgtgtccgatgacttttccatcggcataaacttcgtagccgctacgcggaatggctttgtctgctaattcgatacctacgatttttctttttatgccttctgctttttgcaaaatgatggcctctttgccgatgaattcttccttgtcgagttttacgaacatacctaacccggcttcgatgggagtaatgtctttttcgagctcatgtccatacaagggaagacctacttcgaaccgcagcgtgtcgcggcaacctaatccacagggaagaacttgtttggaatccaccaatatatcccatacccgattgatgaaatcgtggctaccgtatagttcgaagccgtcttctcccgtatatccggtgcgcgatacgattatcgtttcgttctcgtatttcatttctttgcaggtatagaaaagcaggtctttcacatcgaggttcagaagtttttctatgcaggcttcggcgtgaggtccttgtacggcaacttctccgtaatagtccgacaaattttctattttcagatcatatccggtgctatgttccacaatccattggaaatcttttgcaatgttcgatgcatttactaccaagaaaaatcgctcttctcccattttgtaaaccagcaagtcgtctaccgttccaccttcgggatacagcatcatgccgtaaaagattttaccgatttcggcatttcgaatatcgttggtgaaaatatgattgatgtatcgctcgctatcggggcctgtgatgagaatttcgcccatgtgagaaacgtcgaatattccggcggcatggcgtacggcattatgctcttcgatgattgtcgtatattcgatgggcatgtcgaatccgccgaatggcatcattttggctcccaagtcgagatgtttttggtgcaggcatgtttttaatatatcttccatagtcaacaggttttttgttatagaattttttaattgttattgaataatatatcgatgaaactttttctgctcagttggcgtatataattctcgatgggattgtcatcgagaatgcggttgacagactgaggtgtgaaaggaacgttttgaaatttgttcaaaaattcgtcgatttctccgacgagaaaataatctcctactaaattcatcgatttgatgattccgtttttgatttccaatcgtatttctatttcgccggcagggacgtaacctttccgtatccatgtgtagcggggattgtttcccaatatccattcgtcccggaggtattccgtttctattttttcaatgtgaacgatatctttttgagtcagacattcttcgtgatcacaaagtgacgagcgtatgaatctcttgaattcttcgatgtcgatgtcgagatattctttaaggttggttactctttttctgacggattcgattcccttagtaatgagtttctcgttgttgggggtaatggatagaaccaaatcttcgaggttggtatcgaagagcatagtaccgtggacgatacttctgcccgacgtgcgatagaacgcgtttcccgatacttttttaccatcgacggtaatatcgtttctccctgaggcgacagcttttacccccagtttgttgagtgtgtgtgcgattaattgcaggtaacggtcgaatgtgaaactgacattgaaatcgtcggtaatatacgagaacatgatgttgctgaaatcggcatagacacaacctcctcccgatttacgacggtaatattctattccgtgagagcggacatagtcgaaattgatttcgttttccatcaattggtttcttccgaaaatgaccgtgggattgacctgccacatgaaaaagcaatcttcaccgggccgattatgggctatgtattcctccatagccaaatagaaagacagacggcgtacggccttatccggtagggcgatatatttcataggtatcaggtctgctgaaattataccttacaaatttatatattcttttgtaatgggaaatacattgacccgaaattttcttgaattttattttcgagacgaagaatccttttatctttgcataaaagcgaaaagtaataaattagaggtaaaaatgaaagaggacttgaaatataaaggcgtagatttttcggatattgaatcggatagagagttttacgggtgtacattcgaagaatgcagttttgcacaggcaaaactgacaaacgtattattttctcggtgtgagtttattcgttgtgattttagtttatgtaaaatttacggagtttcttttcaagatgtgagattcgtggggtgtaagatgttgggggtcgattttaccgggtgtaagggattgctctcttcgtttgattttgagaaatgtctgttgcagttttcttcgtttatcggtatgaagttgaagtcatgtaactttatcgattgcaatttggaagaagcggattttaccgaatgtaatcttgcggaggctaatttcgattgtgccgtattaaatagaaccgtattttttcatacgaatttagaacaagccgatttctctactgcgatcggatatgaaatagatccccgtcataattcattgagaaaagcccgattctctctggcgggagtaatcgggcttttacgacctttcggtatagttgtagattaatttagtaattttagatattcacttgatttaccgtgtgtccttccaaatattgccggatattgtcggttgcaatcttcatcaatctttcccgagcttcgaaagtggcccatgcgatgtggggagtgatgaaacaattacgggcatgtataagcggattgtcttttcgaggaggttcttgcgataggacatctaccccggccgctttaattcgaccttcgttcaaagcgtcggccaaatcctgctcgttaacgagaggcccccgtcctgtattgatgacaatggccgatggcttcataagcccgatggttcgggcgtttatcagattacgagtcgtgtcggtcaaggggcaatgcagggtgattacatcgctttcggctagtaaggtctccaatgttacgggagtgacatagtcgggcagttggtctttctttttcgatgtttgggctaaaacattcattccgaaagcatgagcgattcttgcgactgtgctgcctatattaccgaacccaatgataccgatattttttcctgcaatttcgaatatgggacttttctgaaaagtgaaatctttaccgtccgcccattctcccgatttcacacattgtgaatgggcggcaacgtcgctggctatgttgagcagatgagcaaataccatttgagcgaccgactcgctgctgtaagccggtatattggtaacggcgatacctctattctttgccgcttctacatcgacgatattatacccggtggctaatacgccgatgtagcgtaaatgaggtagttgctccaatgtggttgcgctcaatggagtcttgtttgtgagaacgatgtcggccaaagcagcccgcgatacgatttcgtcaacagaggtacggtcataaacggtgaattcacccattctttcgataccctcccacgacaaatctccgggattcaaaccgtatccgtcgagcacgacaatgcgatgagacttgcgtttctcttcgatgacgttttctgttgtgtttttcaactcttcccacgatagctcgtcagcttttactttgtatccgttggtcactttccactctctcataatctcttttatttaatgtcaatggcattttttactttttcatcggtcaatgctattttcaggacatcggtaatattttttacatagtggaatgtgagtcctttcaaataggactctttgatttcctctatatcttttcggttttcttcggagagtatgatctctcgtattcctgcacgtttggccgcgaggattttttctttgataccgcctacgggaaggacttttccccgtaacgtgatttcacccgtcatagctaaatggtctttcacttttcgttgggtaaaagtcgaggccagcgaagttaccatcgtaataccggccgagggaccgtctttgggtatagcaccctccggcacatggatatgtacggcccatttatcgaagatgtcttcatcgatacccaatagcgaagcatgcgatttgatatattgcaaggcaattaccgccgactctttcattacatcgcccaagttcccggtcaaggtgagcttttctcctttcgacttgctcaggctcgactcgacaaacagaatctcgcctccgactgctgtccaagccagtcccgttacgacaccggcatagtcgttgttctcatatttgtcccggttgtattcctgagcgcccaaatattcgtgtagatcgtcgatagaaagggtggggttatattctttaccggaggctttcagtcgagcgacttttcgcatgatgcgggctatttttttatcgagttcccgaacgcccgattcgcgggtatattggtcgactattgcagccattacttttttgggaataacgacatcaccttcctttaatccgtgattttcgagttgtttcggtactagatgccgacgtccaatctctactttctcttcgataatatatccactgatgtcgattagttccatgcggtcgagcagaggttgagatatggtattcaaattgttggcagtagcgatgaacaaaattttcgacaaatcgtaatcgatgtcgatatagttgtcgtgaaacgcattattctgttctggatccaatacttcgagtaaggccgaagccggatcgcctttgaaatcgtttcctattttgtctatctcgtccaatacgaaaacggggttcgagctttttgctttgatgagcccttgtatgatgcgtcccggcattgctcctatgtaggtacggcgatgtcctcttatttcggcttcgtcatgtaggccgcctaatgagatacggatatattttctgttcaacgcttctgcgacagattttcccaacgaagtttttcctacgcccggaggaccatacagacagatgatgggtgatttcatatcacctcttaatttcagcacagccaaatgttcgatgatacgttctttgactttatccaatccgtagtgatctttgtctaattgtttctggacatggttgaggttgaaattatcttgggtatattcgttccacggaagctctaacaacgtgtccaaataggtatattgtacagagaagtcgggcgattgagggtgtagcctttcgagttttctcatttctttttcgaaaatctcggcagttttactgtcccatttctttttttcggctcgttcacgcaattcctgaatatcttggtcttgcatgttcccacccaattcttcctgtatggtgcgtatctgttgttgcaggaagtgctctctttgttgctgattcaagtcttcgcgtgttttggactgtatgtcggctttgatttgtaagagttgagcctcttgcgtcagcatttcatagagcttgaacaaacgttctttgatattgctgatggtgagcaattcttgcttttgggttgcagataacggaatattcgcacctaagaaattgaccaaataatgcgcactatctatgttccgaatagcaaataccaattctttggcttgttctccgatatttttcaacagttcgaaagtcaagtctttcaaggcggaaaccaaagcctcgaattccttgtcgttggcatcgggtaaaatttcattttccagcgatacattggctctcatataagggaacgtttcggtaatttcgtcgattctaaaccgtttcattttcccttgcaatatgacagtcgtactctcgtcgggcatttccagaatcttgatgatttcaccgataactcctacttcgtataaatcgtcttttcccggatcctctacggcggcatctcgctgacaaaccacaccgataggggtgtgactgttttgggcatctttgatcaactgtaaagatttggttcttcctacgttgacagggatagccactcccgggaataataccatattgcgtaatgcaagaatgggcaatccttttgtatttaaagtcttacattccgaatcgttttgtcctgatatttctgtaaacagaggcataatcgatggtgtattttcgtcgttttcgcagatcatataattgttcttaggtgtatgattaaatattgacattttgacaggtttaggtttgtcgttttttcattaaacctatttttacctatcgttttactctattgtacaagtcgcgtgccaaagttaagcaaatagcatggcattgtcgaaattattatgtttttttgtttattttgcagggcaaatgagtgatggtatggcaaattctttttttaagtttaaacagtttacgatacatcaggagcgttcggcaatgagagtcagtaccgatggcgtattattgggcgcttggagcagagtggaaaaatcgaatcgcattttggatatcggtacaggaacaggattgatagcgattatggcggctcaacgttcattggctcgaatcgatgccgtagaattggacttcggtgcggccagtgaggcggcattcaatgtctctctttctccgtggaaggataggataacggtatattgtatggatttttgtaggttttacgataaaactacaaagccggtgtatcatcatattttatctaatcctccttatttcatagattctttgctccctcccgatggcaagagagaacgggctcgacatacgggaactcttgattatgaagttttattcgagggtgcgtcctatttattgttgcccgatgggaagttatctttggtatctccggccgatttacaagaacatcttatttttattgcttcgttgtatggattctatccggtgcggtttacttatgtttcgggtattttgggtaaagctcctaaacgattgttgtcggagtggagtagagctcgtagaccattggaagaaaatgctttttccatagagaaaagaggggagggatacactcttgaatatataatgcttactcgtgatttttatttgaagatgtagtcactgaaacaattacggtgtcccatgtgttgtatagcaaagattgtatcatttaaaataaataattatggatattgcaacaatgcatttttggggaaagaccaaatattggtgggctttgattattacgggtatattgatgatcccttgcggactgtggctatggtttcaaccggcattgggatacgaggtgttatctctgttgttggggtggcttttgattctttttggaattgttcagctcattgtatcgggcaatgttaaacaaaaagttcgaggatggggctggtggcttgccggtggaattatcgatatacttatcgggtttatattagtcgggaatttatctttcagcgaggctgtgcttcctttcttttttgcctttatttttgtgtataaagggattgcgaatttgttttctgcattgaatatggtttctacccatagatattggtggttgtatttggttaacgggttgttattgttgatacttggattgttattcttcgcttcaccttttacggctgcgttttctattatttttttgtgtgcggctgcctttatttattggggattttctcttattttcttcggttattctttgagacccgtggaacagtaggggaaaaaggaattattcggtaggtttcaaagcgctctccataagggggcgctttttgtttaagggagttaaaaccttttgtgaaggctctttataaagtggaaaagagtatatttgtaaaaattataggagtgggatgcagcatttagtctgtttttagactctttttaataaaggtcattaaactattcttgcaaaagagagtctaatagatataatttcaatagagtaatttaagattaaggagagatgattatgaaaacaaaaaaatttgccctgttgattatattgtcgatgttggtgacgggttttgccggggcagactcgtatatagtcgaagatgatatttattataatccgaacgataaaaatcctgttgtagaaaagaaagaaaaagaggcccagaaagaacttcaagagaaagctgcggttaaaaaaacattgatggcaacgtcggataatcactttcgagatgtcgatgaatataatcgtcgtggagaatcttccgatatgacgcttgaagatattgcggccaatcagaaagaagattatgtagaatacaatgtggtcgatgaaaatggcgacgacggatattatttgaatggttttaacggctccgactcggattatgaatacgctttgcgcattcgccgtttccacaatccaaagtttgtcgtttcggtaagcgacccattctattccgatatttattttttggataataacgattggaacgtttatatctcggataattatgcgtgggtaaccccgacatggacaaatccgtggtattggaattatacatgggcgccatattcttataccagctggtcttggcgttggagtttgggtccgtggggattctcgttcggatatgatcctttttacagttggggtggttattggggctggaattcatggtatcgtcctcctttctaccaccatcaccatcatcattattacgatcgtccttactatggttggaacagaccgtatcgtcctcagtacactcccaacggccgcactcctaaccgctatggcggtagtgcgatatcttccgggaactctgctgcatcgagcaggcggcgtgcgactgtcggcacagggacttcgggaaatacgaccggtcgtcgtacggttggaaatgtaacttctacatcgggcggacacggttcacaatcggtaaatggagtacgtacaaatcgaggcactgtaataagcaatagttccaattcgaatggcaaccgggggtatagtttcggggaggcaaattcttccagaagggggaattcctcattttcaggaacggtttctaacccatcgagtagtcaaagtagaagacagacgaccatcaataataatacaaactcttcgagaagaaattataatagtataggaaatggtggacgaggtagttcctcgtataatcgcagtacaccttcttccaatcgaaattcgggttactcgaatagttcttcgtcgagtcgtcgttcctccggtagttattctgctccgtctcactcttcttcgtcgagaggaagtggaacgtcttcccggggaagtagcagtagcggacgtggtggacgcagataaatagggttgaattttcaaaatgagacatatgaagaatgtaagatatggtttggcattagctgctctatgtagcagctcaatgcttttcagtcagggagttgttgatgctttgaaatattctcaacaagacatacggggaacggctcgttatatgggtatggcgggcgcttttggcgcattaggaggggatattacgacattgagccagaatccggcaggtataggagtttatcgcaattccgatatagctgcaacgatagacctttccaatcaagtaagttcggtgaatacggctggaaatagaatgtccgatagcaagtttaatgtttcatgtaataattttggctttgtatggactgtccgttttaatcaggaagccttgaaaaatttgaatttcggttttgcttataataagcaaaaatcgtttgaccgctcctataaagccggctattcggggataaccggagccagttcgctttcggggtatattgcccatttatccgaaggttattctgttgcggatttagcttatccagacaatagtgggagtagctatgatccgtataacaataatccgtggttgaatgtattgggatatcagtcctatttgataaatccaaaaagtacgacaggaaatacatggaatagtatagtaggaaacggtacgaatacaacgggagatctctatgttcgagagaaaggttcgatcgatgaatacaactttaatgtcgggggaaatatctataacgtattttattgggggttaggaattgccgttaccgacttttcttatgatattcaaagcggatatggtgaaaattttacggggggatatatctcatcgggtagcccgagtgtggacggctggtacttgatgagaaatgcattacatacgaacggatcggggataaaagtcaatttgggtgtcattatgagagccaccgataatttccgtttgggctttgctttccatactcctaattattataaaatgaccgattcgtatgtggcatcggtgaaatatgattttaatgaatcggggacacgttatgacgatttagccgaaacgccgagtggaagttatgattatgaatttcaatctccgtggcgtatgatagccagtgctgcttatgtttttggacaaagtggaattttaagttttgattacgagtatacatctagtaataatatgtcgttcgacgatccctattcggtcgatgctttttataaaactaatcaggaaattacggagatggtttctcctatgcatacatttaaaatcggaggcgaatttcgtattacaccccaaatcagtgctcgtttaggatatgcttatcagacttcccctgtgaaatcggaatacaggtcgggacgcgaaattcctacggccggaacgcttacgatgtttaccttagatagagagaccaattattttacagtaggtttgggataccgcttttcgaatgtttatgtagatatggcttatatgcatcgctaccgtcgtagcgagctttttccgttctctccgttgccggctgctgtggataatccttataatccagatcagacagagccgtcgttggccatttcgcctcagatatcttcgttgacggaccataataattcttttgttttaactttgggtgtaaagttctaagacagaacggaaatatattttgaaagagcgacttaaaatctaagttgctcttttgttttttatgaaaagaaatgtatatctttgaaaagatatggaaaaattccatgacaagatggaagaaaattttgtgatagatacagggaataaagaatttcaagacgctttgagcttgattcaatatacatctcagtcagtttttttgacagggaaagcgggtacgggcaaatctacttttttgaaatatgtgtgcgagcataccaaaaagaaatatgtagttctggccccgacaggagtgtcggcgattaatgtgggtggtagtacgattcattctttttttaagatgccgtttcggcccatgttgcccgacgatcccgatttgagtttggcgggaggaagaatatatgaattattaaaatacaataagaagcagcgacagttgctgcgtgaagtggaattgattattatcgatgaaatatcgatggtacgggccgatatgattgattttatcgatcgtgtgttacgggtttattcgggtaatatgaggtttcctttcggtggcaagcagttattgttggtaggcgatgtatatcaattggaaccggttgtgacttccgatatgcgagatattcttagccggttttattctaatttctattttttttcggcacgggtttttagagaaatgtcgttggtccctatcgagttgcaaaaagtgtatcgccagcaagatgagcgtttcgtagaagtattggataaaataagaaacaatactgcgacgagagaagaactcgatttgttgaatagccgttatctcccgcaatatgaacctgagaaggataatttttcgattacattggcgactcgtagggatcaggtggactatatcaatgaaaaccgactatctggattgccggggaaagaatatacatttacggggacgataaaaggtgatttccctgaggggagtttgcctacttcgttggaactggttgtaaagatcggggcccaagtgatttttataaagaatgacccggaacgcaggtgggtgaacgggacgataggaatgatttcggacataacgcccgatgagaaaatcgaggtggtgcttgaatcgggtgagatgtatgagttggagcgttgtgtttgggagaatatcaaatatacctacaatgaaaaagaaaagactatcgaggaaagtgtattgggcacttttttacaatttcccattcgtttggcttgggctattaccgtgcataagagtcagggattgacgtttaatcgtgtgattgtcgattttacgggaggggcttttgccgggggacagacgtatgtggctttgagtcgatgccgatctttggaaggtattgtgttgaaacggcagatcacgcatcgggatatattcgtaaatcccgatatcgtacggttcagcaaaggtttcaacgattctgttttgatagaacagtcattgaagctcgcacaagccgatcgtctgtatgtcgaggctgtaaatgctttcgacgaaggcgattttgacaagatgttacaaagttttttcaaggctatccatacgagatatgatattgagaaacccgtaattcagaggtatattcgtaaaaaattgaacgttatcaatcagttgcgtgttaaaaatcgggaacttcaacaggcgttgtccgataggaataccgtattgcgtaaatatgcacatgaatattacctattagggaacgagtgtataactaaggcaaaggatgtgcgggcggctttggccaattttgacaaagcgttgtctctcgatcctacgttgatcgatgcatgggtaaggaaaggaattacgctcgaagatcaaggcgatgaacatggagctatggcgtgttacaatgaagctgtaaggttgagcccgttgagttttaaagctctatataatcggggtaaattacgctataaacaaggcgattatgaaacggcattatccgattttgcaaaagccgttaaacaaaaaccgttacatgctacggcgcacgatcgactcggagatacttttatcaagctggaaatgcccgatatggccgctcgtcattgggctattgcagaagagttgagggagaaaaaacaacagaacaacaaataaataataactatgatgaacaaaggtctgaaaaaaggattgaagattaccggagtaaccgtggcggttatcttggtattcatgcttgtcttgccatttgtgtttaaagacaaagtgataactattgtgaaaaaagaggccaatgagatgttgaatgccaagctcgattttgaatcgctcgatatcagtctcttttctcatttcccgagtgcgtctatcgaattgaatggtttgacactttcgggtatagatgattttgaaaacgacacgttggtttctgctgaatccatcgatgtggctgtaaatgtgatgagcctgtttagtgacaaaggtttcgatgtgaattacgtcgttttggacaagccgtcgataaaagcggtgaagttggccgatggacgggtgaattgggatattatgaaaccggacacggtcgatgtggaagaagaaaaaacggtcgaagtagagggcgaatcttctttccgtctgaaattgaaaaattttaagatagtcgatgctacgatcgtttatgtggacgattccacgaatatgcaattctataccgataaactgaatttgaagctatcgggcgatatgagtgccgatatgaccgatatagacagtaaattgtcctgtaaagatatttacttcgcgatgggcggtatctcttatttgaaacaggctgaggccggagcgaagttaacggtatcggccgacttgaagaataataaatttattttgaaagaaaacacgttgagcttgaatgccattgtcctgaatctcgatggttgggtagcgctcctcgacgatggggctatggatatggacttaaagataaacacttctgagataaactttaaagagatactttctttgataccggctatatatcagaataatttcgataaattgcgcacgacaggcaatatgtcgcttacggcttttgcaaaagggcgaatggccggtgagaatatgccccaattcgggctaacgctcggtgtgaaagatgctacacttaactatgaaggaatgccggcttcggtcgatggaatcaatataggtgcttcggtgagcaatccgggcggaagtctggataaaacaattatcgatttatcggaatttcgtctctctatggcaggcaatcctttcaaggccgcactgtatgcctctacacctatatcggatttgaatttcaaggctactgccgacggtacggttcatttggggaaaatcaaggatatttatcctttgggcgattctataaccctgagtggtatcgttaccgccgatttgcaatttgcaggccgtatgtccgatattgaaaaagaaaattatcagaatataagaggggagggaacactaactgtcgccgacatggatttaacgatgaaaggtttgcctgccgtcgcagtgaaaaaggcgcaggcttcggtttcggccaaagccatgtcgttgtctcagctcgatgttaaggtcggaaagagcgatattcaagcccatggttctttatccaattatctggcgtacgttttgaaaaatgagactataaaaggctctttgacggtgacttcgtcgctacttgacttgaacgaattgatgggtgactcggaaacttcgggagaagagaccgtcgaagccgatacaacgactctttctgtgatagaagttcctaagaatatcgatatgactttaagtgccgacttcaagaaaatccttttccagaagatggaactcgataatgtgacgggtaaacttatcgttgctgacggtgctgtacgaatgactccgttgagtttgaacgcattcggtggagcaatggtggcgaatggtatttatagtacggccgagagcgttgttcgtcctatggttaattttgacctcgatatacaaaaagcctcctttgaaaaaacgttcgagcaattggacatgattcagaagattgtccccatttttgctaaaaccggtggaacatattccgttaaggtcgacctgaaatctgctctggatagtcagatgtcgcccgatttaagttctttgacagccgatggtgtcattcaatccaacgatattcaattacaaaatatcgaagtattcagccagttggcaacgctgttgaaaaacgataaattgaagaatatcgaagcgaaagatttgaaaatctcttttaccattaaggacggtaaagtaaagacttcgccttttgatatgaagctgggtaatattacaatgaatctttctggtgttacaggccttgatcagacgattgattatcgagctaaaatcaatattccgggggccggggctttaagtaatgtttcggcgacgataggaggaacgttctccaagccatctattaagttgaataccgatgaggttgttaagaatgccgtgacggaagttttgggagtggatgccgaagatatagaagctcagaaagccgctattcgtaagcaggccgaagaggcgggaaataaattgatcgctacggcgaaatcagagagcgagaagctcatttccaaagcatcgaatcctttggcgaaagtcgcagctcaggcagccggtaagaaattggtggaagaagcagagaaacaagctcagaagttaaagaacgaggccgagaaattgatagagaaacaatatggtgggtcggaataagaaaattccgattgaaagaaaaagggagacgagattcgatttcgtctcccctttttgtggaaagaagaggagaagccttttgtaaactcgaaatattgttccaaagtgcgggaacattatccgataactcccatcagatatgctcttacaagtttattgattatcttggtcgccgataaaagaaaagaaggtgaaaataggtataaatttttgttgcgtattggcgattcttagtgctgatgcgctatcattgaacgcaaatgtgactgtgcccgattcggtagcggagccgggtgttgaacaaatggatactttggtggtagagagcaaaggagaacctgaaatcaattctttgttccagttaggtagcaatgtcccgacgcatttaaatgtggctgcaccggcaaaaaaacgtccgtggttggctggtgcagaggtagtggcggaagatcttttgtttcatgtgcttacccgatatcttattaaagaggactatgctcaaatttcatggtcatcgataaaaaacaattttaagaccggcttgttgtgggataacgacaagttcgagactaatcttttttcacacccatatcaaggtaatctttattacagcagtgcccgttccaacggattgaatttttgggaatctgcaccttatgctcttttgggaagttctatttgggaatggtttatggagacacaaccggcctcgatcaacgatataatgtctacaacctttggcggaatggccttaggggaaacgacctatcgtctgtcttcgttggtcttgaacggacaggctagggggtgggagagggcatcccatgagttagtcgccgcgtttttaaatccggtacgggcagtcaatcgtttgatgacaggggaagcgtggcgtataggtcctcggtatgtggataaagaagcgactatcccgtttcattttcgatttgaggccgggtatcgtatgctcgataacattagggaaggcaagaacaaaagtatacatgtcgggtgtatgaatttctcgttgatttataatgacccgttcgaaattgaagggaatgttccgttcgaacattttacggctcgaatgttgttcaatatgttcgcccatcaacccattatcggagacgtaaatatttgcgcttctatatggggccgggaacatgattataaaaatgggaatgaattgtttgccggtatattccagaattatagctattacaatagcggaagaatggataatgagtcgaacgaagtgccgtttcgcatttccgagactgtatcctatggccccggtgttttatatcgtatgaaattgcatgaaaataacactttggccttgaacggatttgtgtcgggagtggctcttggcggtgctttgtgcgattattatcaatttcacgaccgtgattacaatatgggaagcggatatagtatccgcctcaacggcttgtttactttgcagcgtcggttcggcatttatttgggatttgagaattaccatattttcacgtggaaggggtatgagcataaggactatgaaaatatgaatcctcattatctcgatgcacaaggcgctgtcggagacgctcgtttgcagatgatgaatctacgtggttcgtttgctattagtccaaaggtgggtatctctgccgaaacagcttggtgtcggcgaaaatcacattataaatatttccccgatgtcctgtccgacacatttgaatttcggcttatgttttcatatcatatttgagatatttactaaatttatacatagtaaaatatgaatatgaaaacacatatttttcttgtttttatgcgttatgccgagtttttatatcccatattgcaaaaacacatggggcaataaatcgtctgtttattagatttattccgatcgtcgctgtgtattggggaaaacgataggtgtatattttgtactattctgtataatattatatatttgttgtgtaaaatataccaatagtatggtgaaagatataatttcactcgctcggcctcaacagtggcttaaaaatgtatttatttttcttccgatattttttagccggaagttgggtgacggggcttgtttgagctccgcattgattgcttttgttatttactgtttggtcgctgggtctatatattgtttgaatgatatttgcgatagagaatccgatcgcttgcatccgactaagtgccggcgacctatcgcttcgggtatagtatcggtgggagccggatatggtataatggctctgttgttggtcttggcaatcgctttgacatttgtttatgattcaaccgtccggcatgtgttgctgataaatgtcggtatctattttattttgaatatagcctattgtttttggttgaaacatattgcgttggtcgatgtttttgtgatatcgataggctttgtgttaagggttcttgcgggtggagtcgttacggggatatggatttcgccgtggattatcttgatgacgtttctgttggctctgtttttgtcgtttgccaaaaggcgggacgatgtactcatttatgagcggaccggagacaagatgaggcttaatatagcccgttataatttggagtttatcaatatggcgataactcttgtcggggttatcgtggtcgtttgttacattatgtatactgtatcaccggaggtgatcgaaagaatggggacctctaatctctatctgactacgatatgggttttggctggaatcttacgttatttgcagttgacagtggtagataagaatagcggcagtcctacaaagatattgatacacgaccggtttatccatgtttgtattgtgggctgggttctgtctttcggggttctgatttatttttgaggaatatgagaattgctattttcgattttgatggaacggttactaccaaagatacacttttggaatttatcaaatttgtgagagggcctgtttcgttctatgcgggttttcttaggtatgctccgcaacttttggcgtataaattagggctttatccgaattggaaggtgaaacaacaaatattttctcattttttcaaaggaatgaggttggaggatttcaattggttgtgcgaggaattttttcaaaaggaaggaaaggctcttgttcggcaaagtgcaaggattgctatatgggaacaattgcagaaatgcaatagggtttttattgtaagtgcaagtatttataattggatcaaaccttttgcttccgatttaggtatccgggacatattatctaccgagatcgaagtggacggtgaaggttgtctgaccggtttcttttcgaataaaaattgttatggacaggagaaggttgtgaggctgctggaacagattcccgatttagaaaataattacttgatcgtatatggcgacagtaaaggggattcgcagctattgaaatatgccaacgaatcccattaccgtgccctgtgattgattcctctttggggaatagcggtcttatactgtaatcaattcgtattgcataactcctaatccgatcttttgtgcatgttcgagtccggcttgccaattggtatcggggtgcatcagatggaatttatcggcgccttcgagatgttcgtgcgggtgtttctcagtcagacaactgccattgattgccggtgctgcgatgaccatatcggcgcaagccttgtccaaagcgaccgggtcgaatgatgcgagtattcccaaatcggggataatggcggcatcgttgtgattccaacagtcgcattcaggtgaaacattcataatgaaactgatgtggaaatgaggcttgtccttcaatatggcttgggtatattcggctattttatagttcaaacgttcagacgtatcgcattctcccattacggctgcatcgtgttggcataaagcgacacattgcccgcaaccgacacatttggtataatctatttcggctttatggttttggttcaagtgtatggcatcgtgggcgcaatgcttgacacagatgttacagcctttacagttctctgtttcgattttgggttgagaattacagtgcaattctagtttaccgcctacgctcgctcctcccattcctaagttttttaaagcaccgctgaatccggcttgctcatgacctttgaagtgagtcattgagataactatatcggcatcggctaatgccgatccaattttcggagccttgcagtactccccgtttaaaggtatttcacggtactccgttcctttcaaaccgtcggcgataatgacttggcattgtgctgaaatggggttatatccattttccatggcgctttgtaaatggtctaccgcgttggcacgtcggccagagtagagcgtgttgcagtcggtaagaaagggttttgctccccaagagcggagtagggttgccagtcgagctgcatagttcggacggagatatgctaaatttcccggttctccgaagtgtatttttatagctacgaattggtctttgaaatcgatactttcgattccagctcgtttgattaaacgctccatcttgtcgagtagattgctcgaaggagtcgtgtgcagattggtaaagaatactttggatttatccatagaaatttgttttaagttagtggtagaaaatgtaaaatctatcgttaaaacggtgatgttcgattttcccggtagactgttcgtttcttacatttattgcaaaaataaggaaaaatcatgattgtattattatcttttattttatttgatatgaataaaattaattatataataaataaaattgaaatttgtttgtcgttttatcatgattgtattatttttgtgtcataagaagtaaatgaaaatatatatgaaacaattaagattaatcattttattctctattttgtctttgtcggtaactgtgagggctatgaaggaacaatcggtgtcattggatacacctacgggaaaaattaacggtaaaataggattaccggatgctgaaaagccaccgatagttttgctgatagccggttcggggcctaccgatatggacggaaatacgaattccggcggattttctatgaagaataattcattgaaattgttggcggaggggttggcgcagcgaggtattgcaactctccgtttcgataaaaggggaattgcttcgagttctgcggctactaaaaaagagagagaccttaggttcgaagattatgtgacagatgttcagggctggatagatcggttgagcgaggatagtcgtttttccgatgtatttgttttggggcatagtgagggttctttgattggtatgttggcgagtgtcgataatccgaaggtaaaaggttttatttcgttggcaggagccggtcggccggcttatgatataatagaagagcaactgtcggggcaaccggcagaggtccggcatctggtaaaatcgatcaacgattcgctgaaagctggaaaggaagtatccaatattcctatgggattgatggctttattccgtccatctgttcaaccttatctcatatcgtggtatcggtataatccacaagaggtgattgcaaaattgaggcagccggtattgattatacaaggcgataaagatgtacaggtgtcggaggaggatgccaagctgttggaacaatctttaccgaaagcacaattccagattttgaaagatatgaatcatgtgttgaaaacgtgtgagtcggtcgatatgcaagttcagcaagctacttatgctaatcccgatttacccgttcaagaggatttattgataacgattgaaaaatttgtgaaacgatgacgacaagcgtgactagaaaaaaattgcccttgcggtgtcctgcatgcgatgctccgcttagagtatctaaaatgatttgcggtcgttgtgcgacagaggtgtcgggagaatttgaactaccggttctgaccagcttgaatgaagaagagcaacgatttatgcttgaatttgtaaaagcgagcggcagtttgaaggatatggcgaaaaagatgggggtaagttatcctactgtgcgcaattatttagatgatttaatagagaaactcaataacatggaagaaaatgaaagatagttggaaatttatatcgaatcctttttataaagtagccggttataaggctgccgggtgggggatattgggcatagttataacgacagcgatcgcttatggagcagatgtgcattttcatggattgcttcattatggtggagctcctcatagtgagtggtggtgttttgtcgtggagcatttggtgatttggttgataccttcgttattggtttatatattgagcctgttttgcagtcgttcccatattcgtccgatagacgttctaggaacagttgctttttcccagctgccttttgttttgttggctttgtgcatggctttcccaccggtacggcatttcatgtccatacagtcgttacaggccatagaggatgcgctatccgataaaatgtttcttttttcggctatttggataggggctttgagtcttttgattgcgatctgggttttgtattggatatttcgagctatttcggtttcttgtaatttaagggggcgtaatttgtggattgtgtttattgtaggaactttcggcggagatattctttgtcgttatttaatagggctgtgttattaagaagctgttttaaatttattgagaaataatattatcattgcaagcaggtatgttccggccatattgcgcccctgtctcgcatcttgaatcccttgatttttgtcaatagcccactattgactgcatatctcggactccaatctgcttcaacataggtctcaatctgtctcggaataaatttaaaacagcttctaataatttgaaagggggcaatgattttatttgccccctttcaatatcggtttgcggataaggtttataaccctgcgtcttttgtcaactcttgaagatgggttattgaaatatctcctaatagacgtataacagtaaattctccacagtcgccgtcatcgaccagcatgattaattctttgatctttttgtctgttttgggttgcacgtaaaaagctacggtctcgccgtcgtcttttactttcatcagttcttcgtatggagctttttgaaatacgatactttcttttcgcatttgaggaatcagagcttcattgtcctcgcaagttaagatttgaattcgatctaactcgttgataacagcttttagatttaatccttctgcgtcgatttgtccttcgggcatcatattcagcaatgccttcgatatgttgacgtatgtcactcctttttgattagcgaatttttctatgaagttgttttcggcagtagctgaaagaataccgaatacagctaataatagaatataaattgtccgtttcataattatttgtattttagatgtttattgactattcgattggtctcgataatttctttttgagcttgttgccattggttcgtccccttatttaatttctgggaaacgagaattaaagctcgttgagcctcggcacaggcatatatttcttgattgctgagtcgtttggaagatggttgtcggtacatgtataatccggtggaaatcgctaatataataccggcagcgataccgcttatccatttccaatttcgggaaaaaagaacctgcctctttttatcgggcaaccgatctatgtatgacgataatttttcttccagatgatcgggaatatgtaccgaacgatcgggtataagagataaaatgatgcgcttctcttgaataaaatcctctggaacttcgtgggttgcgagatagtctctcaatccttgttcttcggtatccgatagatctcctttgaagaacatgtctatttgttgtcgtaattcttgttcattcataatctttgtatgaatagttctttaatcgtttttctggctcgggagagaagtacccgtatattggcgttactcaaaccggtttcggtttctatctcgtcagtgcttttgtcttcgaaatgccttaaaagtagaattttacgttgttgttcgggaagtttatttatgatgttcaacagaaccttcatgtcttcttttatttcataggccgtatcgggttgtggagcaggctctgtcttttgaactaatacagaatcgttgtccgtctcgatttgtggcgctcttagtgtgtcgaggcataaatgttttatcgttgtgatggcataagcctcgttgttttctatgttttcaagactttcccgtttctcccatagtttcagataggtattttgtaccatatcttctgcatcgtattcatttccaagatatcgaaaagcgatgtaatacattttcttatgacagggtagaaatctcgctttgaactcttgatgagtcatatctagttcgttttagatttttcgagcatgtcggattttaagttccctttgcaacgtacgacgttaatttcgtctgaatacagggatatgactactacttcttttatcttcttcggagtagacttgataaggatttttacaaattcatcgtcttcactggtcgtgagaatcgtctcatagggtttaaagtctacttcttcaatttctttttttagggctagataggttgcgttgtctatatcggcttctactacttcaatggccttaacaccgtcgactacgccttttacctgaggctttttgaaatcttccgtatagtattcggcatttggcagctcttttgtttttttgaaaagattatcaattttgttattggcgaataaaatttgcagagtcgacaatagtactataataagaagaaaaattcttgatttcatagtgatgtatttattgtttattatgcgttgtcttctatgatattctgcatttgattgggatcgattttccctttgattcggattaaactgatttcattttcttcgagggagataatgacgatttcccggattttttctttttctattttcatcaggattcgaacaatctcgttttcttcgttcgagctggttactgtttcatagccgtcggaatcgcattgtgttattattttctcgaatctcgtataatctttggacgagatattttcagcatcgataatactcatcgattttattcctttcagctctgacgaaaatggtttgagcaatcccaaaacgaatgaattgaggtttactttctctgcattgggcattcgggaagccgtattgaataagttgtcgatacaattgccggcggagatagaagagaaactgcaaaatgctgcaagtgctaaaatcaaaatttttgttttcatatctgttgttttttagttgttactttaatttagaccggtgcaccttttagggcctttcatataggagacggataaataataaatatgttacaaagaaaaataaaaaaagcgagggaaaaatgattttcttttttcacctcgcttttttagtattataaaattagccgtttcagactttgcgaataatctccattcctttgagtatagcttgttcattcatgggaatgagatgatgatgtcgttcgggcagtgactttttcagtcctttcagtacattttccatacttaccattggtcttagttttagtaagcctcccaatacgatcatgttgaatgctttggtattgttcatttctatggcagcttccatagcgttgatgcaatatacattgatatccgttctcgtaggcgggtggtgtattccgtatccgtcatagatgagtataccgccgggctttactttactttcgaatttttcaagagaaggttggttcagaataacagccacatcgaatgcattcaataccggtgaacttatacgttcatcgctgagtatgactgttacgtttgccgttcctccgcgttgttccggtccgtatgagggcatccacgtaacctctttatcttccatcagtccagagtaggctaatattttccccatagagagtacaccttgtcctccgaatcctgctatgataatttcttctttcatatccgtagtttttaattatacgtttttgaggtctcccatcgggtatttggcaaacatgttttcctccatccatttgttagcctttgccggcgacattttccagcccgaattacaagtcgatacgacttctaccaaagatgtgccttttccggccattgcgttttcgaaagccaaccggattgcttttttcgctttgcggatagaggcgggagtgtgtacactttgacgagtcacgtaacaagttccgtccacccgttctaccaattcagcaattcgtaaaggataaccgttcagtgcgacattccgtccgtagggacaggtagaggtcaccattccttctagtgtagtaggagccatttgtccgccggtcattccgtatataccgttgttgataaatatgatggctatattctcgccgcgattgcaagcgtgaatggtttcggccgttccaatggcggccaaatcgccgtcaccctgataggtgaataccattttcttggggttaagccgttttacggccgatgcgatggccggcgcacgtccgtgggcagcctcgatccaatcgatgtcgagataattataggcaaaaacagcacagcctacgggagcgataccgatcgtttcttcttcaatacccatttcgtctataacttcggcaataagtttatgtactactccgtgactgcaacccggacagtagtgcatgggattatcgttcatcagccgaggtttagtgtaaaccaagttttcgggctttataatttcgttgatatccatgtgcataaaaattatgaaccagataaaggttcgggtatttacattagtttttctttgagagcattaagaacttcgtcgggggtaggtacgattccacctaaacgtccgaaatgttctactcgcacttttccgttgacagccaatcgaacgtcttctaccatttgtccggcattcaactcggccgataggattcctttcacatgatttgcatggcgagcgatagcttccgtcgggaacggccatagcgtgatgggtctcaacaatcctattttgataccttcttctgctgccagctcgattgtcttttggcatatacgcgacatggaaccgaatgcgacaatcagatagtcggcgttttcgcaattgatttcctcgaagcggacttcattttcactgatacgtttgtaggtggattggaagcgaatgttattctgctccataattgccggatcgagttcgagagaggtgattacatttcttttccgatttttggtttttcctaatgtcgcccacggattttgttcccttatttcttcttctgtacggcgtttgcggaaaggcggaagtaccactttttccatcatttgcccgataattccatcggctaaaataatagccgggttacggtatttgaaagcgagatcgaatcccaacgccacgaagtcggccatttcttgaaccgaagcgggagctaatgcgattaaatgataatcgccgtgaccgcctcccttcacggcttggaaataatcggcttgactcggttgtatggttccgagacccgggcctcctctcatcacattgacgatcaaacagggtagttctgcaccggccaaataagaaattccttcctgtttcaagctgacaccgggactggaagacgatgtcatcacggctttaccgcaactagctccaccatacaccatattgatagctgcaacttcgctttcggcttgtagtactaccattccggtcgtttcccacggtttttcttccatgagtgtttccatgacttccgactggggcgtaatagggtatccgaagtaaccgtcggctccgtagcgtatggcggcatgtgctatggcttcgttacccttcattagttttatatcttctttcataattaacggatttagagattaaaccggttataattttactttataaacagtgatacacccatcggggcatacaagaccacaacttgcacacccgatacaagcgtcgggattctgcataaaagcataatgataacctttgtcattaacttcggtcggctgtaatgccaaaacttggcacggacacgctactacacatagctcacaacctttgcaacgctctttgttaacgacaacagcacctttaatattagccatatgattttgtttttagttccacaaatataaaaaatatatttttaaattgatagtaaaataggtagtttttttgttaaactacctatcggtgtaaatgattgacttttaaattaatagtctaattaaaaaatatatcgaatatggataaaatgtaatatttttgtcttattatgttttataacatagtttataatggtgtattacttataaattgatagttatcctattttgatacccgaaaaacccataaaggccatagccagtaatccggcggcgatgagtgcgattggtgtgccttgcatggctttgggaatatgggataaactcatttgttcacgcatcccggcaaagattaccaaagccaatgtgaatccgattgctgtcgatatggcataaacggtagcttcgagaagcgatagatttttttgaataacgatcaatgcgacacccaatatcgtgcagtttgtagtgattaatggcaggaaaacgcccaaggtctgatagagggaaggtgctatttttttgatgataatttcgagtagctggaccaatgcggcaataaccagtatgaaaacaatggtttgcatgtagtccagtttcatcggcatcaataaataggtttgtaataaataggtaactatcgtcgctatggtcatgacgaaagttaccgccgcacccatacccagtgccgagtcgatgcgtttggagaccccaagaaaggggcagattcccaagaattgggatagaactatattgtttacaaatatggcggtaacaaatatagagatataggtgagcataatcagcgggttttaagtgtatggataatagcgattaaaaagcctagtgcgataaatgcaccgggggcgaggataaagatgagagacccatattcttcgggataaaccgagataccgaatacgtgtcctgttcctaaaaattcacggatacaacccagtaaggtaagggcaaatgtaaaaccgagtccaataccgagcccgtcgaaaaaggagtccaccggattgtgcttggcggcaaaggcctcggctcgtcccaataaaatgcaattaacgacaatcaagggtataaaaagtccgagtgtttcatataaatcgggtaaataggcttgcatacacagttgtagaatggttacgaacgtagctataataacgatgaaagcgggtattcgcactttatcggggataaagtttttgaccatcgagattgcgacgttggagcaaattagtacaaacagggtagaaagtcccatacccaaacctcctatggccgaggtggtcgttcctaaggtggggcacatgcccaatagaagaacgaaagtcggattttcttttataataccgtttaaaagtattttcgttttactcatgattgcctcctttcatggattcgatataagccgtataggcggtttgtatggccgctaaaaaagctctcgatgtaattgtcgcggctgtgatggcgtctatatcgccggaatcttgtttgacttgtaatttgttgcgaatcggcgatttcccgataatattctggttatttttctcggttctgaaccattcgtccatttttgcgcccaatccgggcgtttcctgatgtttcaggactcgatagtcccgaatcgttccatcggcttcgaaacccacgataatgcgtatttcgccaccgtaccctgtggagttgctgcattcgacagcggctccgacgagaacaccctctttttttgccggatagacgatagccgtagtctcaccgtattcattacggacagtgtaggaacattgttcgtctattggggagttgtcgtatttcggaatgacttgttggattgctttttctcttcctgccttagtcgcacgtgctatgggttcttgggtaagtcgatgggtatatcccaatagtccgccggccacggcggttatcaaggtcagagaccaaagcatgttccaaaatgtagaatcttttttcttcatgatcgatggttgccgaaacgtttgggtttgatataattattgataagcggtgtaaaagcattcatgataaggattgcgaaagaaactccttcggggtaacctccccattggcgtataacgacggtcaagatacctataccgattccgtagataatcattcctttggaggtcatgggcgaggtcacgtagtcggtcgccatatatatagcccctaacaaaagtccgccggacaatagctgaatgagggcaaagtcgaatgcatattgccacatgggtatattttgcatattgcctgtttcttgcccgcatgccaagacgaaactgaataagaagactgtcaagaggatagagacgggtatatgccaactgatgattttccggtaaagcagataggcaaaaccgattagtagggcgatagcgcctacttcacctaaactacctccttgatttccaatccatagattagcgatatctatttgttcgatccactggcttccctcttcttttaatttagaaagtagtgttgctccggtctcggtatcggtatagttccaccgtgatacgattggccgaggccattgggtcatctgggtagggaaggatatgagaagaaatacccgtcccgccaaagccggattgaaaagattgttccctaagcctccgaaagacattttggcaatccctatcgcaacgatagaaccgatgacaacgatccatatcggcagattggagggcaggttgaaggccagcagcaatccggtgagtatggccgaaccgttaccgatagaaggcttttctttcagtaaatatttctggattagatattcgacaatgacgcaagagagtatagacgagagagtaacgattaaagccccgattccgaaaaaataaagggaaacggcgaatgcaggcagcaatgcgatgatgacattgtacatgcatttcgagacggttaaattatcgtgtatgtgaggggctggcgatacggttaattccattgcgagataaattaagattgttttctggatcgtatgatttggtttactgcatttttccctattcgtatataatcgagtataggacggtttgacggacaactataagcacaacagccacattccagacatgcggtgatgagttctttttccgctctctcgaacaaatgattttctgacaatttggccaagagataaggttcgagtcccataggacatgcagaaacgcatttgccgcatctgatacaggaagaggtttcgctccggtgcgcatgggcttcgtttaatatcaagatacccgaacagcctttgggaataggggcatctagattggaaaccgcttttcccatcatggggcctccgagaatgacctttgcgctgtcggagggaagaccgccggcaatctctatcagctcacggataggcatacccaatcttatccggtaattccccggttgtttaacaccgtctcctgtaacggtgacgatacgctctacgagcggtttatttttctgaacggcttcatacacggcaaaagcggttccgacattttggacgatagctccggtcgaaaccggtaatgccccgtttgctacttgcttatgaagaatggcatcgatgagctgtttttcaccgccttgcgggtatcgggtgcggaggggcactatttctatgcccggatatttttcggcctgtttttttagtagggcaatagcgtctcttttgttattttctactcctatataagcctgttttacatggatagctttcattagaatgtgacagcctattataatttgttcgggcgattcgagcatgagagcatggtcgtccgtcaggtagggttcgcattccgtcgcattgacgatgaggaccgtaggcttgaattctttgggaggtgtcagttttacatgggtgggaaaagtcgcaccgcctaaaccgacgataccgttttgtgctattttttgtataatttcatttgaagataaagcaatctctttttccaaagagggagtccggtctatatattcctcccaatcgtctccttccgtatcgatgataattgcctgagaatatattccgaatgcgttagctattttatctatcttcgagacggttcccgataccggggagtgtatgttggacgatacgaatccgttggcctcggcgatgagagtccccacttttacggtatcgcctttcttgacaatgcaattggccggcgctccgatgtgctggttgagcatcagagagacttgtcggggaaccggaatggcggttaccgggcattgcgatgtcagtttattctctttggggtgtatgcctcctatgcggaatgtttttaacatattgcagtttcctttctgggggttgatgtttccctgatattgtttcttatttcggtatgtatcgcatgggtagggcatccgtcgacacacgcttggcatgatagacagaggttatcgtcgatatacgctaaattgtctgatagagaaatagctttttcggggcaggtcttgacacattttccacaacctatgcaggcgacggaacaaactttgcgggcgatgatgcctttgtctttattgttgcaagccacatatatcatggattcttgtttcttccgtagctcgattaaatgtctggggcaggcttttacacaagaaccacaggcaacgcaaatattggaatcgatacggggaagtcgagtgacgggatccatcgtgatacctccgaattcgcaagctgccgcacaatctccttcgccaagacacccgtaattgcaattgctctctccggtataaagcgaggaaacgaccgcgcagctatgtgctccttcgtaatggctggtttgcgggcggttctcgcaagagccattgcaacggataacagcgatacgaggagctttttccacagcattcaggccaagaatgggagcaatcttttgcataacctcattacccccgacgggacataacagactgtctaacgatgtggccttcgtgcattgttcggcgaaattccgacatccggcatatccgcaaccgccgcaattcgctcccggaagaatagattctatttcgtcgattcgagaatcttcttctacatggaatttacgggaaatgatgtaaagtaatgttgcgctgatgagtccgataatacttagtatgatgattgccgttaccataagttatgagacatgtattggtttcaagaaaaatctaaatcgttttttcagtcgatcgcgatagaaatatagtatcgtgtaatatatcgctaatacaacaagggcacatacccccgaatatagttcgtttactcctattcgttcattgatgacgagcgacagcataatgagaattaccgggagggctgccgtaaaccatatagctctgtatcctgccgaggtagaaagagctaccgaaactttatctcctatctgtatgggaaaatcgcatttttcaacctcgataattttttctttttggtcggttgtcgtgcacaatgaagccgcatgacaacctgcgcaagccgagtgttgtatgatgcgcacgaatatatgcgatttggaaatacctgttataataccttcgtgctctatatcaggtcgtttcatacgagaaaaacttttttaatcctttgtttatttttatctgtcagaaataagaattgtacagttttttatatttgtcttctttttgaatttcagaaatccatttgttcaagctgtcgagtaatatcgagtcgtcttttctgagggcccatgattggaactgagtaaaacttatatcggtattacagtctatttggggataatctttgctcatttgctgggctattgctttgtcgcatacggctaagtcgatttccccagtagcgaccatcatgatgagctgttcggccccgtatgtcttttcttcttgtatatatatggtatcgcctatttcacgagacaagttgtgaatgcgtaatcttgtaggagcatcactgacgatgtatagagtttttccggccaaatctagttggtttcttatcagtttttttttcgctttgggatcttttctttgaaccaatacctgtttgttcagttgaatgggtatggtaaaagccaattcttccttgatttcggacgttacgggtaattgacgggcaatgatgtcgtattggccttttttcaatccgtcgatacttttgcttaggttaacttctggggttatctcaatggaaagcccgcttcgattacctaccatgcgggccaattcatagtcgaatcccgataggctgtcgccttgtaaatagtaagacaatggggtataatccgtaacgatcctcaaaacaccatcggctttgatttcctcgaaagttctcggtcggtaagtgtttcggggacgcaaccatatcattgttccgacaactattatcaatagtgcggcatatataaatatgtgtcgtttgaacttcatatcgttaattggaaaaatctatggataaccccatttgaaacatacttggatttaacggataatgtggtaatgagaaatagttatttcccccgaatatcccttgattcacgtgcgacatcatgacaaagaaacgagtttgtttcaatttcatatttatatatgcgttcatgaaaggataatttcccacttcgatttcatcttgggtatgaaaagttaaggtcgccggttggaaagcctcgcttttatattttgtgtagtaacgacaatctacacctaattgaacatgcaatactttggcgattctgaataaaaggtacatattgctatatacgctcaattcgggtaaggggattatcgatggtttgctcgatttttggtaaactatttcgttttcccaattaaaaactccgaatttaaaatcctgattgagttttgcgtggaatacttgtatcatggagctttcttgccggggcaagctattattgtcgaaatagatataattttgtatattttcgacaccgacgttcaatttggttctccaccgttttatgttgaattcacctccgactctcattcgacgtgttttcccgaaatcattgtcccaaatgaagtgattggaagtgtatttcttatagaaataagaaggttcggtgtttttgaaaaagccataggctcttagttgaacggtgtcattccaaagcctgaatcggctgcgaatatcggcagtgacgtcgatatcacctatgattgctccggcaagtccgaatttcccgtttacatgataagtcagtaattctcccttttgttttgaaatttctccaccgacccataaaaggctttctccgtggctgcgaggattggatatatcgggacgtggagtcaaaccctctattgtagttccagccgaaagggtgtcctgaggcaaggaaaaatggcgatattcgtaagtggcgtaagccgccaatcccatctttgcatacttattgaatccttcgagtaatgatattccgaaagtatttcgtatagactggtatcgggtttcttcattcgtccctccaagacctaaataggtgttcgcgaagtaggtagtgtcttcggttgccgattgattgacaaacctatgcttattttcgttatactcgatggtgtgtataatgctggtgacgggaatgaatgtacgtatcacggttgtgtcttgctcttcttcttgatagaacccgaatttatatcgttgggtggcatagtattctttaccgcgaatacggttatatgcatccgtcagattggttggaatcgtttgggtgtttacgctcgattgtcctccttgtacctcttcgggacgaagtatgtatgtatcgtccgagatacctccgttttcttggtttacgaaattatatgtattaagaaaaaattgaatatcgtatcggtctcccaaatagcttccgaagatactgtatgcaaggtctttcgtcgcttgatgctggtagtggcctctcgataggatataattgatgctacctccgaattccagtttctgattaaaatttccagagaaaacagcttttaaatcatcttgggcagtttgtttcgagcctcctgtcagataagatagttgggtataaggtatgtgtgaattatagaatttccatgaagaggctgtttgtatccaatggccgaatggatctttaaatataaattcagatggtaaaggtctgtcgaaaaatattttggaaaaagcagcagcgccgagattcccggtcgtcccataagccgttgaatagctggaaggaatatccgtgctgtaaaaattgtgcatgagagtatccataggaacatcatatctcgaccctaacggctgggtaatactccatgcataaggagcaggaatatcctgttttttcttagcctctgaaaaaagtgaacagaaaagtacagataatatgataatacaggcctttctcatcggtttgcaaagatacgaaaaagccggcaattacaaacgatgtgtttttgtatattttgccggcgtttaattctttttcttttttaatccaatggcctttaatggctttggtaaagatatcgttttatacttcgtttaggtgttttttcgaactcttcataatagattttaagacggctgatttggctataagccggaagctctttattgagggtcgatatgttttcttccatcagagtttctaatgcatggccggatatattcgaatgttgtgcgttgtctatatcggggtaaacgagagcgaccaatttgccgtcttgttcgatgatgagcgattcgcatacatagggcatattattcagtcgatcttcgatttcttccggataaatgttttgcccggacggacccaatatcatgtttttatttcttcctctcaaatatatgaacccatcggcatctatcgtacataagtctccggttttcatccagccgtcctcggtgaatatcgcctgagtagcttcttcgtttttgaagtatcccagcatgatattcgtacctttcacttgcagttcacctacaatattttctgaatccgaagagtttactcttccttccatacggtctactatccgcccacaagagccgattcgagtctcgtcccacggggcataagagatgagcggaccgcactcggtcatgccatatcctacggtaaagggaaaattgatacgacgtaggaattgttctacatctctatttaaagccgcacctccgataatcatttgagagaggttccctccgaatgtttcgtaaagtttatcgttgatttttgtcaataactgagtgtctaagaatggaacttttaaaagaagtttcatcaaaggtttctctaataaaggaaacactttggttctgataattttttcgatgatgagaggaacggctataattagtttgggctttaccgtagcaaaagcatccatgatgatcttaggagagggaatccgagtcaggaaatgcaagtgacagccttttaaaaatgggtgtatcatttctataaccatgccgtacatgtgtgccatcggcaacatacaaacaataccgtcacctgcggacaagaacggtaaatggtctaaacaaaatttgacattggaccataaactgcggtaggggagcattaccccttttgaaaaaccggtggagcccgaggtgtaattgataacggcgagttcctcgggagaatcttcgtaatagcttacggcatcaggggtaaatcgggcaggatattttttcccgaagtattcgtttaatcggttccgcatatccgtcagcttttcactttttgatcttaataaggaaaagtcattcaataggaagattcctttcaggtttttcattagcgtttcgttcaggtcttcccagacaatatctccgacaaatagcagtttcgcttccgagtgattgacaatgtggtgtatattgtctgctttgaattcatgtaagatggggacgggtacggctccgtaggtgattgccgcaaaaaaggctaccgcccagtgagctgagtttttgccgcagatagctattttgtctcctttttttatttcggcactttctaataagagatgtattttggctattttgcgggcaatgtctttataatgataagatacaccgtcgaaatcacttaatgcgattctttcccaattttctttaatggcttgttcgatgtatttattgaaactctcgttgttcataaaatcaagtttttatgtcatgattttacaaagttacgagatttcctgaataatcctaatgtttctgtgtctattttgggaaaagaggaatagggttcctaaacttttcgtaatgaaaaaagaatgttcaaccctcctgataaaccgttttttacccatatctctcctttatggaagagaacggcgtttttaacaatggcgagtcccagtccggttcctccgagtttgcgggaccgacctttatcaactcggtaaaatctttcgaataatctgttcaaatgttcttcggggacaccgattccgttgtcgaagaaagagaaataataatatttactatcttcgagataacagtctatcgtgatttttgttcctataccggcataggctatggcattgtctgtaagatttctgaaaatggagtacaataaggaataatttccatttatggacattcgttcgtggaggtttttcgtctcgacggtcatttcccgttctgtcaaggccgcttgtgattcgttaataacttcattgatgattttttgtaaatcggtattatccgtgtcatagaggtccttagattcgtccagcctattgagcattgaaatatctcttagtaaatcggtcaatcgtttggattgtgcgtagcaacgctccataaacatttttttccggctatcgtccatttcggtggaaagaatggtctccatatatccgcggatactgctgaccggggttttaagttcgtgagcgatgttttgagtaagttggcgttttaaccggctttcttgttcttgttgggtaatatcgttaatggctatttcaaatgtatggtcttgaaatataatacattctatgaggaaagttcggcttcctttgcctataaccatagactccgaaataaattcctcctgttcgttttgttcatagagcttttgagaaatgaaattgttgatttttttcagattggcctctttaaataaatagtcggagggagatagggtattgtctgtgataaaattgagatactgaataaaaagattattggccataataatccttttatctttggcaaaaaaggccaatccttctttggagaactgtaaatgcttgaatagtttctcttgctctatggatagtttctctttggtttttaataagttatcataaatgtgagtaagactttgggtaatattgccaatgtcgtttacccctgattttatagtaatgtgtataggctttccctgttctgcctgttgagacagctggctgagagcggcaatggatttccccaagctgtggcaaaaataataaagcaacagtatggcgaaaatcgatatcgctaacatgaaatatataaattcattattgggactgagtatggaaaatttctcccgttcgaaaggaagtgaggagcgtatgatccaatcgtcatatcgtttagctgaatagaagaaattttttttgaacgattgagaatatcgaatggcatatccattcccattttttagagatgatcttatttcggggcggtccaaatggttatttgcaagggagtctggttctttttctcgttggctttcgagcaatacttttccagagagtgccgatataatagttactcttagaggttttcgagtaatactctgtatgatggagtcgattgaaatttggtctatctctttgtttttaatttgggaatatatgagttcgttgtaatcttgtaaaagggcatttagagattgctgtcggttttctttttctagattatattcgaatagtaagatgatagtgataaaaacgatgaaaagagagccgatagaaaaaaataattttctatcgaacgtcatagattttcgaaccttctcagtagacataaattaagctgtttcgaaacaatatccgtatccgagacgagttacgatgcgcttaccgtattctcctatttttttgcgtaggcgggtaatattgacatcgatagttctgtctaaaacatatacctcatctgtccatattttcgataatatttcttcacgagagaatacttgtcccgggtgggaaagcaggagggataatatttcaaattcttttttagtcaatgggagttctgtactgtctatgaacgctcgtttttttacagagtctatgtacaatttttcaaattgtaaaatagccggatcttctttgtctacaattcgtcttagtacggctttgacccttgcgatcacttctcggatagagaacggtttcgatatataatcgtccgcaccgatattaaatcccatgagtttgtcgtcttcggtatctttggccgttaaaaaaatgatgggaatatgtttcagcttctcgttttttcttaacagagaggccattttgaatccgttcatttcgcccatcatgacatcgagcaacaataagttataatcggtcaggttcatttgtagcgcttcttctgccgaatttgccgtatctacgtcatatccttcgacctctaaattgaatttcaaaatttcgcataaatcttcttcgtcatcgacgactaaaattttgtaattggccatagtttcaatttttatgatagtgcaaaattgagaaacagatatttcaacaatgtgacaaacattttactttttaatcttcattctgctgtgttttgttgaaaattgaaaagtagaatataatctttcacgtcgtttcccttacggtcgcttcgtagggtttgttcaaaagtatattgttctccgtacttttcttttatataattgaaatcccgttcgccaacgagtaaataaccatttttaggcatttctttttcgaagtcaatgactcggttttgagcataaaaattaataatgaaaaatcgcatcatagaggacgatacataagaatatatctctccatttgggacagtcgatactactttgtctgcaaacggtttcatcgattttgcattgagtatagccggcaaagtagaagcgtccaacatcagttgaatgccgaaaaacagggctacgaccgagtaaagataacggttattataggttaggtatcgtttgctcttatagatgtcataaattaagaatactataaatatggcagtaatgatgaatatgatatcccacgattcggaaagggctgttacatagtgactgatgtcactcgtagaagacatgacgtatttgtctataattccgcttttgacgatagttagaaccaccaataaaaatcccccgataaatgctatgaaaattgaaaatattctccatattcgcggtctttgtttgagtagaaagagcatgtattctgccaaaaaataggctatgaatgggtaaatgggaagaatatataccgatcttttacttttggggatacaataaaaaacgaatatgatgacaatggataggagactgaacagtctcattttatccatgtgtgtgatatagtctttgaatcgttcccaatatagtttgaccgtgccttgtggtctcttgtattttaaggtaaataatgacatgataactaaaagcgaccacggtaaccaacccgctaaggtaatataaacgtaatagatgatgggttgctcgtgtgaaccgtatgacatttttcccaagaagcgatcgacgttttcttccataacgagccgtagaaatgcttctcctccctgttgataggccgcataataccagagtaaaggcaaaatacaggatagtagtgctatgggaataattttatagaaggctttccatacagacactttttggaaaagaaggaatatgccgattacggcgcatggaagtacgatgcccaccggtcccttagtgagcgtagctatactcataaatagtattgcccaaatggggattcctttcaacccgagttcccaccatcgatataattggagcatggctaagacgatgaagcaggtcagtaccatatcgactcgcgacgccattgcagcccgatgcacttcaaatcccgagagtagtaatagagaagcaaggaatgctatgtcatttctgctacgtttggcaaaaaagagaaaacacgcgattgccataatgattgtcgccaatgccgaaggaaggcgcgaagtgaactctgttacctctccggcaggaagggacaacgctgcgatacaccaatgaaaaaaaggaggcttgtaggcgatgtctccgccattgtttataggtagtatccagttgtcgttttgtaacatactgactgccacgatggcttcccggggttctcctttggtgtggaagttggttagccccaaatagggtatgatcgttaaggtactgatgactaacagtaaaagaaatagagatgtcttggaacttattttaggcacattcataatggagacagtctttaaatcgtttggttgttatgaggatcaaaattgatttttttatctataatatattccgggcgatttttggtttcatcgaagatgtttccaatgtactctccgagtattccgatggtaaacaattgcactccacctaaaaatacgatagtaatgattgtcgaagaccaccccggaacgatagattctttgccggaaaggtacatgatgaatacccagatagcaaaagccaatgctataaaaatggaaagtgttcctaatgatatggccaattttaatggctttttagaaaaaccgaagataccggccgaggctaatgaaaacatttttcgtatggaatatttcgttctgccggcagcacgttcgttacgggtataatagaacggagtttgtttaaatcccatccaactgaaaagtccccgcaaatatttatgcttttcgggaaactgtttgaatgcatccaaaaccttgcgatcgatgagcctgaaatcgcctgtatcgacaggaaatgtgtagtcagatagagagttgagcatgcgataataaatcttggcagtgaattttttcatgaaagtttccccttcacgtttattgcgtaccgcatatactacattactgccttctttcaaataagtatctattatttggggaataacttcgggcgggtcttgcaggtccacgtcgatgataacggcaatgtctccggtacagttgtgtaatcctgcactcacggcattttgatgtccgaagtttctggaaaacgatattacttttgtatgaggatcatcgttggcgaaaccgagtaaaagttcttctgtgtggtctttgctcccatcgttaacgaaaataagttcataatcgtgagccgtactttccattacttgggaaaatcgcttatgggacaagggtagtacttcttcttcgttataacagggaatgattacagatactttcatggtatgaaacttttattttttaaaagtgatacatctattcataatgaaattacacagtgtatatacgatcatactcaaaagttgagcccaagaatcgggtacatataatatctctaccaaaatgagtaacgatataaattgtatgccatagcatatcccgaaacagatgaggaataagatggcttcgcggataaagttactatttaattttttaaatacccaaagtttgttccaaaagaaactattgacgacacctgctatatagcctataaaattggatatggtatattttacatgtagaatctcttgcaggaagtaaatgacgataagcgttataagggtatttatgataccgacaataccgaaacgaataaattgtcctattgcttttttatcgtattttttcagtcgttcgaacatgatgaaatgtcagtctttaatggggttggtcgtgtcatctttcaaggctggcaaagaccagtgaaattttacagcgagtaagcgaaccgcaacgaccgatatgccgcaaatggattggttggttatactgttgaaccccattttttctcctagataaaacatgattcctccggcaacacaagctaaggcatagatgtctttacgaaatagcagaggttcttcgttgatgaggatatcgcgaatgatactgccgaccgatcccgtaatggttcccatgacgatcgctacccaaaacggaaatccgaacatgagtgttttttctactcccacaacgacaaatagagctaacccgatcgtatcgaatatgaaaaacgtattttcgagttttaccaagtattgtttgaaaataatgacgaaaataagagctatggccgttacggtgaggtagctgccgtttatcatccagaaaggagttgcattcaacaagacatctcggagcgttccaccccctatggctgttacaagcccgacagcataggctccgaaccaatcgaattgttttgcggctgctaatcgaataccactaatggcgaaggccagtgtgccgacaatttctaatatggtggcgaaagttgtattcataatctttcgtatggaattgcaaaggtactattttttatgataatctgtcgttcttattttatttttgggagttgagtttttgtcgtatgaaataagttctgtaaagatattttgtgggaataaaaatgtacctttgcaccaaatgtggaaatagactgtgctcggtagagtccgataaatttgtttctgcttttgtttgcactatttctcttaatacaaatctttaatgaaaaaacgactgctaatacttctttcagtttgttttatctgtgtttccatatttccttcttctccgaaatatgaaatgagggcggtgtggataacaacgaactggggattggattggccttcgcgtccggtaaaggttttgtccgatagatatatacagcagaaagagttgtgttgtattctcgatgagttgcaatcggtgggaatcaatacggtgttttttcaagcgcgtattcgaggtgaggttttttattcttctcgatacgaaccgtgggctgccgttttaagtcatgggcgggaacccggatatgatcctcttgctttcgtcatcgaggaatgtcataaacgggccatcgaatgccacgcttggctcgtcacttttccggtgggatcgaataggcaagtgaaaaaacaaggtagttcttcggttgttgcccgccatcgttcatggtgtaagcaattatcgggggaatggtttctcgatccggggaatccgtcagtgaaggattatttaagagcattagtcggggaagtcgtttctaaatatgatgtcgacggtattcatttggattatgtgcgttatcccgataatgcgatgaggtttcccgataccgattcgtttaggaagtggggaagtagaagcaagtctttgttgcgttggagagaagacaatataaccggtatcgtcacagccatttatgaagaggtgaaacgattaaagccgtgggtgaaagtcagtagttcaccgttaggcagatatgcttcattagaaggtttccctgcggaatggagctgcatggaggctgtttcgcaaaatccgaaggattggttgcagagcggacggcatgattttattgtcccgatgatgtatttcagggaagaaaattattatccgttcttgtacgactgggtaaattcttgtcctcccgaaaaagtaataagtggcttgggtgtttaccggttggataagagtgaaggtaattggcctttcatagaaataaagagacaaatcgagaccactcggaaaatgggagtgggacaggcctatttccgatatgaaaatttacatacgcatacgattttgaggcaatggctcgtttcctgtttttacaggtatccggccttgacacccgggttgaaaaatcccatatcgcaaataccggataccccgaacaatttacgagtggaggcacagggcggtgtttctaatatttcttggagtccggcagatggtgcgttcacctatgtattgtatgcgacaaatgattctttggatatgaatacgggagatcagatcgtggctgtattacctaaaaatatacattcatgttcattgtcgattccttatagaaattatgccatagtggctcgtgacaggtatggaaccgagagcgagcctgcgttttggacaggtaaaaacatagaaccggataagtatcgaataactctataattataatgttgatataaaaaataaaagctatgtatcctttgaaatttgaagacattcttcgtcctatgatttggggtggagaagaaatcagccgattcaaacagttacccgaagttcaccccggtatcggtgaaagttgggaaatctcacaagtaggcgaacgtgtatcggtcgttagcgagggggaagataaagggaaaacgattacggagttgattaagcgcgacggggcgaatttgctggggaagcatgtcgcagctcgctatgccgataaattcccgttgttgattaaatttatcgacgcacacgataatctctctattcaagttcaccccaatgatgagttggcgatggcccggcacaattcatttgggaaaaccgagatgtggtatgtcatcgacgctaaaccgggagcaggcctctattcgggattttctaagcaaataactcccgcagagtatgtagagcgaatcaaaaataatacgattaccgacgtattgcaatttcatgaagtgaaaagcggcgatgtgttctttcttccggcaggccgtattcatgctatttgtgagggaatattgatagccgagattcagcaaagctccgatattacttatcgcatatacgattatgatcgtagagatgcgcagggcaatgccagagagttgcatatcgagcagtctatcgatgcagtcgattttaaaatgtatgataatttacgaaccgattatgcggctaaaaataacgatgctgtcggtttagtcaaatgcccgtatttcgaaacgaatttaatcgaagtggataaaagtgtgaagcgttccgtttcgggacatgattcgttcgttatctatatgtgtatgggtggaaaagtgcgattgaccgataataacggttacacgatatctttacatcaaggacaaaccgcattgattcccgctacactctcatgggtgacaatcgaggcagaaacttctgcgaagttactcgaatgttatattcccgaataatgaagtgttttttataaaaagaataatgccggagaattattcttcggcattattcttttggttatgattgtaatatttgcaatatgggcggattccgcattccaagcaattgggtttgcgagccatacaaatgtaacgtccgtgtagaatcaaccaatgatgtgcgatggggagtaggtgtcccggaatattttttaccaatgttttttctgtttcgagaggagtttttgaatggttggtaagtccgattctgttggagactctgaaaacgtgagtatcgacagccatcgcttctttgttaaatacgaccgatgctatgacgttggctgtttttcggcccactcccggtaatttttgcaaatcttctatttcggaaggtacgacaccgttgaactgttcgatgagtgtacgagccattcccaccaaatgtttcgatttgttattgggatatgatacgcttttaatgtatgtataaacttcttccggtgtagctgcggccagatcttgtggagtagggaatgcttcgaatagagccggggttatcatgtttacccgtttgtcggtacattgtgccgacagaatgactgcaatcagtaattgaaatgggtcgtgatattgcaattcggtttcggcgataggtttgttttcttgaaaccatttaatgactccggcatatctttctttggtagtcatggcgttataaaaattttatcatatgaagactatatttcgctaagaaaaatcctccgaaaacggcaataatacctccgagattagtaccgatgatatagaatagggcactgtgggctttccctaaattcaatagattcatcgtttccaaagagaatgaggagaacgtggtaaatccacctaataatccgacgaataaaaaagctctcagattaggtgaaaaatcaaaagaataacaaaaagcccaaagtatcccgatgataaaagagcctgctaagtttacacataatgttccccacggataagccgggaaaagacgttgaatttccgaagcgataaaaaaccttgcaacagaacctatgcctcctcccgcgagaacacaagcgactttacaaaactccattcacataaattttaatgagccgattcgaattcttcgaggaaacgtacatcgttctcagagaacattcgtaaatctttgactttatatttcagattggtgactcgttcgatacccatgcctaatgcataaccgctgtatattttactatctatgccacatgcttcgaggacattggggtctaccataccgcaacccagaatttcgacccaaccggtatgtttgcaaaatgcacatcctttacccccgcagatattacaggatatatccatttcggcagaaggttcggtaaacgggaaataagaaggacggagtcgaatttgagtttctgatccgaacatttctttggcaaaataaagcaacgcttgcttcaaatcggcaaaagaaacatttttgtctatatataaggcttctacttgatggaaaaagcagtgtgcccggtaagatatagcttcgttgcggtaaacacgacccggacaaatgatgcggatagggggttgggagtgctccatcgttcttgtttgtacagacgaggtgtgtgtacgaagaagaatatcgggagaacgttgtataaagaatgtgtcctgcatatcgcgagccgggtggtcttcggcaaaattcaatgctgagaacacatgccaatcgtcttcgatttcgggaccttctgcaattgaaaatcccaaacgggcgaagatatcgcatatttcgttttttactaaggaaagcgggtgtctcgatcctaacggaatggggtaggctgttcgtgtcaagtctatattttgagattccgaatgggtatcttcgaattcgcttttcaaggcattgattctttctgttgcaagagtcttcaattcattcagttgttttcctacttctctcttttgttcggcggcgacagttctgaaatcattgaaaagttgagaaatttctccttttttacttagatattttatacgaatattctctaaatcttctgatttagaaacttttaatgcctcgatttctgctttgatacgttggattttttcaatcatacctgtataattcttatttttaaatgcaaatttaataataaatgacttctttttgggtggatttttgagaaatattttttttgacgaataaaaaagggaatctgctgaaaaaatattcctttattactaattttgttatgaatttaagaagtaacgatatgtctgtctctccatttttacaaagtatacacgagtttgtcgaggataaaaaacttttagacaaatctggccctgttatcgttggtgtgagcggaggagccgactctattgcgttacttcatgtcttgaagagtttgggatattcgtgtatagtttgtcactgtaatttcaatttgagaggtgaagaatctttgcgggacaggaattttactcggcagatagcttttgagtggaatttgccgttcgaggagatttcgtttgatgcttcatgttatgcgatgaccaataatgtgtcggtcgagatggcttgccgccaactgcgatatgattggtttgaagagaaaaggaaacaatatcgggcacaggcgatagccgtggcccatcatcgggacgatagtgtggaaactctgttgctgaatttaattcgaggaaccgggattgccggtcttacgtcgatgaaaccacgtaacggatttgttgtgcgaccgttgttgaccgtttcccgtaaagatatagaatcgtatttgtcggaacatggggtgtcgtatgtggtcgattgtaccaatttagaatcggtttatatcagaaataaaattcgattacaggtattgcctttgttacgttcgatcaatccgtcggtcgaccattccatatattcttctattttgaatttgagggaagtagaatcggtctataaagcggctatacatgagcaggagcaaaacgtgttggaatataaaggtgaatatatttatattccggtggagaaactgaaacagcttccgtcgcctaaggctttcttatttgaatttttgactccttacggctttgtttccgaacagataacagagataatatcgtcttgtggcggtatttctgggaaggtgtttttgtctcggaattacagaatcgttaaagaccgggaatatttgatattggaaccacaggaaagagaagaggccgggactgtggtagagaaaatcgaaagtctcgaagaatgtggaactttgttacacggaaatttatcgtatcgatgtctggacaacgatgaaacgtattgtttctctcgtgataaatcctatgcttgtttcgacttggacaaacttgtatttccgctaattattcgccggtgggagacgggagatcgttttaccccctttggaatgaaaggcagccgtaaattgagcgattattttagagatagaaaatattctctaatcgataaagccaatgctttgttgctatgttcgggaaatacgataatatggatattgggagagcgcgcggccgatggatatcgagtgactgcggatacaaagagaataatcgaatttaaatatgaaaaatagttaaataataaacttgtttttacatttcttgttttgtttgacaaatcggccgtatatttgtacagtgaaattgcgtagtgaaattctgtacgcagtaaattcaaaaatccaataattatatttgttctttcagccagtatgagtaatcatgcaggtagctttaataaatataaagtgtaaatcatatttatttattcatgtataatattttagaattgagcgctaaaactcttgaccagttgaaagtgatagctgctgaaatgggtatccaaaagattgatggtatagaacaagaagatcttgtctataaaattcttgatcaacaagctattgatatggcaagtaaagctgccgctaatcctcctgctccgaaaaagagaggtcctaaacctaagaaaaataaagagaagtctgtacttgaaaaaccgaatgaactagaaagtaaatcaaatacagagcctacaccgtctctatctgtggaatcgacaggagtggaagatacgaaagaggtgaaaaagaaaggcagaaagaaaaaaagcgatgtaacgagtgaaacctcgaaaaaagaagatgcaaaacaggataatgttacagaagtaaaagatattccttctattatagaagagactgggttatcttctcatcccgctttgaaagagccggtagccgaactatttgagaatttaaaagaaagctctatggcgttggtggaaaataacggttccaatgaaaacgaagagcttcctcagcaaagtacacaaggagggcaacccaaacaacgcaaacggatacaaaagaaagctcttccggctgaattgataaatgaagctcaaaacacactgcaaacaccctcgccttctgttccggttacaacgccttccaccccggtagaaaacaagcaacaggaaattattcaacaacagcccgctaccgcaaatcaaggacaacaagcaccgttgcctacatcgtcgttacagacattcttcccacatagcgaaaagcaaagatttgttccgagaggacagcgcacattcgtcccacagaataggaacagccagaataatgcaggaaataacaatgggcaaaaccaaaactcgaataatcaacaaacgtttgtccctgagcctaaacctgtcgagagaccatacgatttcgatggaatattgacaggtgtgggggtattggagatgatgcccgatgggtatggatttcttcgttcgtccgactacaattatttgacttctcccgatgatgtctatgtttctcaatcgcaaataaagttgtttggtttgaagacgggcgatgtcgttgaaggacctattcgtcctcctaaggaaggagagaaatattttccgctggtgaaggtggagaaaataaatggtcgcacacccgaatatgttcgagaccgtgtcccgttcgatcatcttactcctcttttccccgatgaaaaatttgatttgacgagtggaaaatactgtaatttatctactcgtgtggtcgatatgttttctcctatcggtaaaggacagcgtggattgatcgttgcacctcctaagacgggtaagaccgtgttgttgaaagatatagccaatgctatctctgagaatcacccggaggtttatatgattatattgttgatcgacgagcgtcccgaagaggttaccgatatggcccgtagtgtaaaagccgaggttatctcatctactttcgacgagccagccgaacgtcatgtgaaagtggctagtatcgtattggaaaaagccaaacgtatggttgaatgtggtcacgatgttgtcattctgttagactccatcactcgtttggcgagagcttataatacggtttctccggcctccggtaaagtgctctccggtggtgtcgatgccaatgcgttgcataagcctaaacgctttttcggtgcggctcgtaatatagagaacgggggaagccttacgattatcgctactgctttgaccgagaccggttcgaagatggacgaggtgatattcgaggagttcaagggaacgggtaatatggagttgcagctcgatcggaaattgtctaacaaacgcattttcccggctgttgacatcacggcatcgagtactcgtcgggacgatttgttgttaccgaaagacacactcaaccgtatgtggatattgcgtcgatacttgtccgatatgaattcgatagaggcaatggaatttatgcgagaccgtatggagcgtacttcttcgaatgaagaacttttgctgtcgatgaacgattgagtatcgtaatagatataaaaagaaggccggtgaattggaattttcaccggccttctttttatatggaccaaacaaagtgaacagagtgtgtgttatatgaataaatgtataagaaaatggagataccctcgatacaactgagtttggaacatatagaggagttagattttacctgtcctgcggcaaaaaaatcgataaatataggaaaagagattattccggttaagtttgtggtaaatatttatcccgatgttaaacgggattattttaagttgataacaggagtccgttatattcgtcgtcgtaattttatcggtcaagaacttcttttttatagaatcgctgtggtttataaaattgagaaattgaaggattttgttaagctcgaaaattcccaagtcacagttgatactcggttacttgcattgttattgagtatatcaatcgggtcgatgagaggaatgttggcactacgtacgcaaaatacagtgttcaaaaattatccgttacctctgataaatgtatccgaaatattaacttccatgaatataaccgattctgagggtatctgggagaacttgaatatatattacaataattgaatcctcgatgaataaattgattttgctccggcatggagagagtatatggaataaggagaaccgatttacggggtggacagatgtcccattgtccgaaaaggggagagatgaagctcgtcgggcaggagagctgttacggagtttttccatatatcccgatatttcgtttacgtctttgttaaagcgtgctattgttactcgctttttagttatggaagaattggataggttgtggactccggcatataaagattggaggctcaatgaacgacattatggtgcgctgcaaggcttgaataagttggaaacatctgagaagtatggggcggagcaagttcatatttggcgacggagttatgatgtcagacctccgcaagtaggagacgaggatcccagatatccggctcatgatgcccgttatcagatggttcaagaaaaactgttacctcatggtgaatcgcttgaagatactgttcatagagtgttgccttgttggaaagagcgtattttgccagaggctgagaaaggcaaaacgatactggttgcagctcatggaaatagtttgagggccttgataatgatgctacaaaatttatcgcccaaacaaattgtagatgtagaaatacccacgggaaaacctttaatccttgaattaggagaaaatttaacggttttgaatcaatactatttggggtaaaataagcagcatgggctgtggaagtaaaatcttttttagcttccatgatatattctttttcggttttctgtaaatagctatatttgtccgattattgatttaggtatgaagacgaataagacgaatgcggctcggctgttggatagggcgaaaataccatacgaattggttccctatgaagtcgacgagaataatttagctgctactcatgttgccgaacaactgggtgagaatatagaacaagtattcaagactttggtattgcgtggcgataaacacgggatattcgtttgtgtgattccgggcgacaaagaggtcgatttgaaaaaggctgctaaaatatcgggaaataagagtgccgagatgattgccatgaaggaactgttgccgactaccggatatattcggggtggttgttctcccattggcatgaagaaaaattatcctgtatatatccacgaaagttgtctgtcgcatgaccctatttatattagtgccggacaacgaggattacagataaaaatagcagccggggctcttatagagtttgtttcagcggaggtcggagaccttgtcggttaatcttggtacgcgatagattcagtgtgattagtccacagggtgtaaaatgtcttgtccatataagatgattatagaacccgaagggggatacataggtgtgaacagagtcttcgtctttattcacagtcttttttcatagtttcctgtttaaaggctcggataagccgggattctatgcggagaaattcttgttcgaaattaggagtgaagattcctttccccatattttcatgtatttctgaaaatgtccagaactttccgtcgtcgatttcgactggatcgatttgcatttttccggtatataccgtatagaatgtgtttaccatctcgcgttcctgatccgattcgaagatataagtaagcacatgtatcggaatgaaatgcgtgattcccaactcttcgcgaacttctcttgccaacgcttcttcgacggtctccccgtaatcgatatgaccgcctacggccgtatcccatttgccgggttgaatgtctttattcgtcgatcgcttttgaagatacaactccccgtcgttatttataatatgtaggtggactaccgggtggagtaatttcgatccgttgtggcattcacggcgggtcgcttttcctattgtgttaccttgttcgtctatcagaggaaaccattcttctttattcatgattcaaatgagtattcgggttatagtcttgaatacgtttttgcagcgtttcttcatcgagagggttcccggcttcgtcgaatggcaacctgaaaccgcatccttctttccatcggctgcatccgtatgccgtctttccctgtatgatatggccggtgtggcatacgggacatgataaaagttgttcttttggtttcttctccgtagatgttttatttgttgtttttttcttcccgggtttggccgatgtcgttgattttttcttcggttcctccgggggtggagccgctgtgattttgccggaattgtcgcttagtacgtacaaaacgatttcgcccaccatttttttcagttcttccaggaaatcggcggcacgatattcgttgcgttctattttacgcaatttgttttcccaaataccggtcaattcggccgattttagcaactcgttgcgaatagtcccgattagttccactcctgtttgagtggcaaccagattcttcctttctttacggatatagtggcgtttgaacagcgtttcaataatggcggctctcgtggaaggacgtccgataccgttttctttcaaggcatctctcagttcttcgtcctctaccgattttccagccgtctccatggctcgcaataatgtggcttcggtatacggtttgggaggctgggtccatttttctgccaaagaaggtgtgtgggggccggtttcacctttggtgaaagcaggcaaggtgctttccgactcttcgttattttcttctttcccgaatacggttctccaccccggagataagatttgtttccccgtggctttaaattcgatttgatttacctcgcccagtacgaccgtattggaaacgatacaatcgggatagaatgccgcaataaatcttcgggccactaagtcgtacactttttgctcttcgcccgtgaggttggttgcctttacgttcgtgggaatgatagcatggtgatcggtcactttggagttgtcgaatacctttttgctcttggggatcttcccggtcgaaaaaagggctgttaatgttgtgtaagctgttaatgccgacattatgcccggaaccttcggatatatgtcgtcgcttagaaatgtagtgtcgacgcgagggtaggtggttacttttttttcgtaaagcgactgaatgattttcaaagtgttttctgccgagaaagagaattttttattacactcgacttgaaggctggttaagtcgaataatctcggtggcgcttcttttccttgtttggtcgttatatcggtaaccgtgaaggggaatccctctatcttttgtagaaattcttttccctctgcttcggtttgaaatttccctttggtgacggcgaatgtcgtttcccgatataaggttttcaattcccaataaggttgaggaacaaaatgttcgatttcgagttgacggtttacgattaatgccaaagtgggagtctgtaccctcccgatggaaaggacttgacggttctgtccatatttcaacgtgtaaagccgggtagcgttcattcctaataaccaatcgccgatagcccgtgaaagtccggcaaaataaagagagtcgaattctgtttgaggtttgagattttgaaatccctctcgtatggcttcttctgtcaaggacgatatccaaaggcggtagaccgggcatttacaagctgctttttgcataacccatcgttgaatgagttccccttcttgaccggcatcaccacagtttatgacggcttcggcgttggacatgagcgattctatgataccgaattgtttttctataccccggtcggagattaatttaatcccgaatcgggtgggtatcatgggcagggatctcaatgtccattgtttccacgagtcggtatattcatgaggctcttttaatgtgcagagatggccgaaagtccaagtcacctgatagccgttcccttcgtaatatccgtcatgtcggttctttgcacctactatatcggctatttctttggctacactgggtttttcggctatacagactttcattatattgttttgtagtttaaacgaagaaacaaggaacgacaaaatccgtttttccggtcgtgtcttactgttactcatttccgagtgcaaagttacatttttattttcattcttcgtaatatccggtcaatggccttgtagagattggggcttgtaagaaaaatttgtctggtcgataacttttagaagtctgcggtcggtaatcggggcggtaaattcttttatttcagtttcagtcagtttcctgtcaagggagtgtataagcctgatgatcgagcgggtattaataagctggcaagtgaaatcggtagatggtccgaaataggtttcgtatgtttgttttctgagtgctcggagtttctcttctctcatggaaatttgttctttttcggattttttgttgaacgactctatggttctttctacattatcgggtggcgtttggatctctccgaatacaaatttcagagtctctttttcggtatttgataagtccatatttcgcttttcgagagcttttataaagtctgaatattcccaattaggaggtgtcgtcatggctctccaactttccaataacattaaaaaaggcaggtaatattccgaagtcgtagataaagggtcattcatggcaaaaatatctgcgaatgatatataatctatatttttaatactatattcgtttataatattttcgtctataatattcatatatacaaatatatgataaataaaattatagtaattatttagaattgataaatgataagatgtatcagatatttctccttgattatatttcgagtttatatattcaagttttgctttaaatttattttcttccgaagtataatatttttgttttgaaagggtgtttaggctttttatccaatcttccgtttccgaaatgttttttaatcgtatttcccttaattcgtaattgattcgggcattcttacctcggtatgtcgagtgaacgcagttttgttctatttctcctgaatatcgatagggggcgaataattcgtccaagtacgtttctatgtaaagtgtatctgttggttcgatataaaaagggatatatcgatccccaaaaattagtttttgttggattggatagcgtgtagggatttttgcggagaacgaaccgtctggtgcgataggaatgtttatttcggtctgtttcccggagaacagatcgtcctgtatgattttcccgtcgggtaaattcaaccgtttgtgatatccgacgaatttaccttgtagtatagctgtgtctgtgtcgaatgttattgctggtgtagcagatctgtatattggattgggttgtggatatatggaagtcttgttccttttttcggttagagataaacctataattctgatttcgttggatttttgatttccgatgatatcgacctccgttaaggacggagggagcgcagggaaatccatttctatatggatcgtactgtcgctatcgaattggaaaattcggttgaaatcgacaccgtctatatcccgtactttcccggaaaaccgttttatactgtcttggacgacccaatcgtcgtgtatggttaaagacgtgtgcgggagttgtttcagcgtgatgtacattcggcttacggtgtctcgtaatagaatactgtcgactgttacaaccggcgtatttcgagcgacccagttcgggttggttattattttttctgcatgaagcgaagatatgagcagaggtaggaagagtgataaaaaagctctcattagtgattcgttatatgtgttatagcgaatgaacaaatgagagccgtagtaagttcaatttgattacagtcctttttgtttggcctcgtcccaaatggcatccatttcggcgagagacatatcttttagatttttacctttttgtaatgtttcctgttcgaggtagttaaaccgtcgtataaacttttggttcgtatgttccaatgcattttccgggttgatgtcataaagtcttgccgcattgatgagactgaaaaatagatctccgaattcattttccatattatccgggttcatgttttctatttcatttttcagttcgccgaactcttcaaaaactttgtcccagacttggcttttttcttcccagtcgaagcctacattgcgtgctttatcttgtattcgataagcctttattagagccggtaaggccgatggcacgccttcgagtacggttttattaccgcctttttctttcagtttgagttcctcccaattttgctcaacctcgttcgatccatcgacatgggttgtaccgaatacatgagggtggcgatagattagtttttcacaaagagcattgcaaacatcggcaatatcgaaagaaccgttttcttctcctattttagcatagaaagcgatatgtaacaatacatctcccaactcttttttagtggcttcgttgtcctttctgataagagcatcacagagttcgtaggtctcttctatcgtgttgggacgtaaactttcattcgtttgcttatgatcccacggacacttttcgcgtagaatatcgaggatatcgataaaccggccgaatgcctctattttttcttctctcgtgtgtgacatgtgtttatttattaaatgcttttagtcctttttgtaagaaatcgataaatttaggtacgctttcattgtatccgtatggggcggctaatggctctccgtcgctattgataataacatagtatggttgagcattggctccgaatttatgtctttgtaagaaactccatttttcaccgacggtcgttagttttaccgatttcccattttcggttaccgtaatgggcttctttaatttttctttgtcatcgaccattaaggtaataagtacgtatttgttttcaagaatctgttttacaatcgggtcggtccacacggaagcctccattttacggcagttgacacaaccataccccgaaaagtcgatgagtatgggcttcttttcttgtcgggcgtacgccaaaccctcgttatagtcgttgaaggctgcgtgaacttctttattatataagttgaaatcttgggtatataaggggggcgtaaatgcactgatcgcttttaacggagctccccacaatccgggaatcatatataatgaaaaagatagcgaaatgatggcgaggaataaacggggaacggagacgtgtttaatcggggaatcgtgcgaaaagttgagcttaccgagcagataaaatcccagcaatgcgaagataacgatccaaagcaccaaaaatgtttcccggtcgagtatgtgccacccataggcgagatcggctaccgataggaatttaagtgataaagccaattccaaaaagcctaatatgactttgacggtgtttaaccagcctcccgatttaggcaattgtttcattaaagacgggaacatggcgaataatgcgaacggtatggctaaggcgatggcgaaacctcccattccgacagcaggtgcgagtgtcccgccccaagaagcggcttctactaatagagtgccgattatgggtccggtacaagagaaagaaaccaaaaccaatgtaaacgccatgaaaaagatagcgatgataccggttgcggtgtcggccttcctatcgagtttattactccatgatgcaggtagggttatatcgaaagccccgaagaaggagactgcgaaaagaaccaacagtgtgaaaaacagtatgttgaacaaagcgtttgtcgctaaatcgttaagggcactggctccgaatagtagggtaatcagtaaacccagtcctacatagataatgatgatggacaaaccgtataagatggcttcgccgatcgccttgtgccggctttgttgttttttcaggaaaaagctcactgttaggggaatcatgggccaaacacaaggtgttagtaatgctaacaatcctccgataaatcccgatatgaaaataaaccaaagagaactttcttgcaataatttttcggtactcattgctcgaagttcttcaactactggctgccagcctttttgactggttaaattggaagatgagtttgtattaagatttacaggagtcataaccggggcggttgtcgttggagttttgctttctccaaaggaaaattcatgtttggttggaggcaaacaagttacatcgttacacgcttggtaagttatgtatccggtaattttaaaactatcaggattttctataaatatagtttgtttgaaatctattgtagaattataccaccccaatttcatatcgaataaagcgctatattcctcatgaggtcgtttggacggggttacatctccctttaacgacacattggatatctcgtcgaaagagaacgaagtaggaataggccctccggagggaatatcggtagcatataaatgccaaccatcttctatatatgcatgaaaaataatctccttctcattactttctccttgcatggaaactttccatttgacaggctctataatttgagaataactactcatgcaaaaaagcatgccgacgatcaataaacctaaaaactttttcatattacccaattttgtgtggcaaagatagtgcaaacgagggcagaaacaaatttatttggttatgccgagtgtcgcctattttcgcatttttgcaaagatagtgcatattagtcaaatcgaaaaccgattcggcgatatgatttgggaaataatagataaaatatgtagatgaacaaaaatagtgttcgctatgtggataataatttttacctttgccatgaatgtaagtatagtcttttcatcgttaagtaaaaatcagacaataaagacaaatgatcaataagataattgcagaagaaaaaatacagcaggttcgtaagctcttggagaaaaaggaaaagattgtgattacatgtcatgtatctcctgatggagatgctatcggggcttcgttggggttgtatcattttctcgatgggttagggaaagaagtaaatgtggtcgtcccggatttactccctcggaatcttctgtttttaaaagggacgaaagaaatcgtagtctatactcgttatcccgagtttgccgaaaaattgatgtcggaggctgagcttatattctgtttggattttaatgctatcagccgtatcgaccggttgcaaaagtctgtgtctttatccgaagcgaagaaagtccttatcgaccatcatttgaatccggaggatttttgcgatgttaccatctctcacccggaggttgcatcaaccagcgaattgattttcaggttgatttgtcgcatgggtatgttcgatcgcatggggttgtattccgcagaagccatctacacgggaatgatgaccgatacggggaattttacctataactccaatattcccgaaatgtattacatcatagcagagttggtaaaattaggtatcaataaagataaaatttatgctttggtatataataccaattcggtagataagataaaattgaacggatatgccgtcagtgagaaaatggaagttttcccggaatataaggcggctatgatatcgcttacccgagaagaattgaagcgatatgattatcacaagggtgacagcgaggggctggtaaacgtacctttgggtattgaaggaataaggttttctacttttttcagagaggataaggagtatataaaagtctctatgcgttccaaaggatttttcccggttaataaagttgctgcggagcatttcaacggcggagggcatttaaatgccgccggtggagaatttcatggtacgatggaagaggctcaggctctgttaaggagtatattacctttgtatgataaatatatggtgaaggataaagactaagaagtatttgataaatatggtaaagatagcacgaattttatttgttttttttacggttatgatggtattatcgtcttgcgataatggaaaatcctatgccgatttgttgaaagaagaagataaggcggtaaaagcctttttggccgataaaatagtaattaacagcattccggcagattcggtatttgttactttgcaagatgtcggtaacaacgatacgttggcagtaccctattatcgtttggacgatgacggcaatgtatatatgcaggttcttgatgccgggatacaagacgatcgttttgagaaagggaatgatgtaaacattcgttttcttagggtcgatttgaaagcattgatgaatggtgagaatcccgatccggtgggtaatacgaatccggccgattacataacgattcgtttcggtgaaacgacattgtcttcgacaactcaatatgggacgggtattcaatacccgatgtattttctcggcaatgaatgtaaagtcaatttgttgattcgtgcaaagttgggatttacggctgaaacttctacggttataccgtatctgtatactattagctataacaaatcaaaataaaacaaaatgtctctcattaaatctatttcaggaattcgcggtacaatcggaggaaaagccggagatgggctgaatcctttggatatcgttaagtttacggcagcgtatgctacctttattcgtaaaaacacaccggtaaaaacaaacaaaattgttgtcggacgtgatgcccgcatctctggcgagatggtgaaacatacggttatcgggactcttatgggaatgggattcgatgtcgtgaacatcggattggctacgactccgaccaccgagattgccgtgactatggagaaggcttgcggtggaattatattgacagcaagtcacaatcccaaacaatggaatgctttgaaattgctgaatgagaaaggtgaatttcttaatgccgccgagggacaagaagtattaaatatagctgctgccgaggcattcgattttgcagacgtcgatcatttggggcgtttgtatgaaaacaacacatatacgcaaaaacatatcgagagtgttttggcattggatttggtcgatgtcgatgcgattcgctcggccggattcaaagtagccatagattgtgtaaattcggtaggcggtattgttatccctgaattgttaaaggctttgggagtaaaagacgttatagaactgaactgtacgcctgacggaaaattccctcataaccccgaacctcttccggaaaatttaactcaaatagccggtgtaatgaaggaaggaaaagccgacgtcggattcgttgtggatcccgatgtagaccgtttggcaatcgtatgcgagaatggcgaaatgtttgtcgaagaatataccttagtcgctgtggcggattatgtgttgaaacatactcccggaaatacggtttcgaacctaagttcttcgagagcgttgcgcgatgtcacacgtctgtatggacaacaatataacgcctcggccgtgggagaggtcaatgtagtgactttgatgaaacagaccggagcggttataggcggcgagggcaatggcggtgtgatttatccggccagccattacggtcgtgacgctttggtgggtatcgctttattcttgtcgcatttggcgaaagagaaaaagactgtcagccagttgaaagcctcatatccggcttacagtatagccaaacagaaaatacaacttactcccgatatcgatgtcgatgccttgttggttgctgttaaggaaaagtatgctcaatacgatattacggatatcgatggagtaaagatcgattttcccgatcgttgggtgcatttgcgtaagtccaatacggagcctatcattcgagtgtattccgaagcccgtactcccgaattggccgaagagacagctgccggagtaatggctgtaattgcagagatgacaaggaaataatgcatgattatattctgacagaaggaggaggctcgtcgagcctcctccttctgtttttatctagatgtttttacaatccgttcgcttctcgttttttcgtttgtgaatatctgtactacatatataccgtcggtcagatttgagacatctatatgctgattgtcaaaaggcagggggtatattttcccggtaaggtctatggcgtttactcgaattatatcgctctcggtagtattaattttatcttttgcataggtaggatacaactttgccgattgtttgttttcttcgattcctgtatttccgtttttcacgattttgaaagtatcgaatagagtcgcttgggcatttgcatccgatgtgtatgttttgacttctatttcagaactgcttacgcttatttcactaaatgcaggtgctccgggttgtccatatttccctgtgaataaatcccaataaccttcgactttatgtttgtcaaatcctgcttccatttcgtcttgtgtataaggatagtaacgttttcgtccacaggttccgtttacaaagtaaagagtcccgtcctttacattgaatgtcccgccttgttgtcctttggggtttttattgctgtcgggagaaactagttctacatttgtcacgcttcccggaacgatcgttttcgtcgtattgtttatgggacccattacttcataaatgtggtcatgcccttgtatgacaaaatctatgttcaattcttgaaatacaggcagtagggtggctctgaacaaagccccgtcttcatcggtctgatgtccgctaccggtaaataagtttttatgtacggcagcaattctccatttggtatcgggatatttttctacttggtctctaaaccaattggctacgtcgttgctcagatatgtactggtcccattcgcataactgtaacttccccgccaaaaatcttgatggctatataccataaataaagcatcgccataaacgaatgagtaggtaattccgtcgaattgaggtttgactgtcgctgtttcgttgaaagccttgtcggtattgaaatgatatgtataattcaaattaggagtgtcatcgtggtttccatcggtcggagctaaggccattcgggataaaagaggtttcatgcttacttcgaaccattgttcccattcccattcggagttttgttctgttcctgtttctacaaaatcacctgtgaacaacaagaattttgcatcgggaacttgttgggctgccgtgattgcagaccatcgtgcattttctacatactcattgtccataatatgggagtctgtcatatataagaatttaaattcttccttgttcgtattagctgtaatgaaggatttaatatcgctccaattcccatcatatcccacacgataggaataggttgtattcggggtaagtccggtagcgatggctttatggcttgtgtaattgaattttgtgttagtgggtagtgcggctgcttttaatatgccactggtacttaccgcataatttagattgtttgcagcttgatgagccgcttctatttctgtggcatttgtaaaatccgattcgacagcattgcttttggctacaatttgtactttcccggaagaaataccactgtttgtaaaccaagcgaaagccattcgggtggacgggtctccgttgatatttgtaactacgcaatagggcatacctttgggtacgagtgcttgaacctcttctttcaaggcgagaaggttgatttgagagctgtcagctcttgcggcctctttggccataagcatttttatgtaagagggaatcgtatagtcatcttgtgacagtttatcggcttctaatacatcggggtgtataatgataacaggtttttcggtgactgttatgtggcaagtatctttaaagttgccgtctagggtcgtaacgataatttttgtttcgcctataccttttcctgtaactaatccaccctcgacgacagctatcgaattgtttaaagaattccaagaaacttttttattagaggcatcggacggtagtacgatagcagataaccactgttgttgctcttcttcaatagatagagatttaagtgtcagagaaacagattgtacagctacatcttttgcttctggatcatattcataagctcccaaatcatatccggttcctttgggacgaacggtcccttttatgtcgtaggcaggagcatcgttatcggcaacccctttgtcgatacacggggagttatttgagaatgtccagtctgctgcacgcatggcttctatatcggcggcagaggtgggaatacctataaatagagtgggggatttgaagttgggcccggtcgcatctgtatttatggaacttagagttaaagcatctttggcatcggcaaatccactgaccgccgcgttgtggctcgaaccgtttccttcaataaaagcgataggatcgccgaatccttcttctgcttgattgttccaacaaatcgtattgattgtttttccttcactatggattgcggcatattgggagccataattacaagctattatacagtttgccacaatgccggaaggattataaataccaccactattgggccaaccgcttactgttgccgaattgttatggataatacagtttctgacgataccgccgttctcgttgcgtatggttccatatttgccttgattgcctcgcatgatacagttttcgacaataccaccggagttacgtatcgcaccaccggaactggtggaggagcatagctctataatacaatcttttataactcctccatcattgaaaactcctcctccgttttgtcctttacagtttttgatacggcatttcgaaagagtaatattcgcccggatataagctgctcctccatcgctgctatgttcggcattttgaagtgtaagtccttctatgagggttggattttcgcacggggaatcgtatttgacgattaagtattttcccaaacctgttccgtcgagtatggtttcgaatgtttcgatgtttcgtgcacctgtatctgcattatatccgcctaaaatatttactccgtctacaatagatacatattcattgtagagtcccgaagacacaaataccgtatctcctgtatggcagctttctacggccgatttgatggaaccttttgcggtagcccaagataacccgtcaccatcacaacctgccgatacatatcggtttgtggcattacaccaattactcgatgccaataaggctatcgataatgtcaagcaagataatttttgtttcataatattaattatttgttaatgaatttgttataaaattattttaaacgggcatatttgatttcttatttttatatgttttatagcacatattttgaatggatatattttaataaattgacaattaggtgtttgtgtcttgtctgtggatatagatatacctttcggatactttcgaaatgaaatatatcgaaaccttatacagaggaataagccaatagaagaattatttgctccttatatcggaatgaagaacagatgaaattgaaaggattgctttcttttgaatgagaattttagaacatttttgttgatggggtaggtatattatagcctttcgttcaagaggtttgcaatatcggtggtgaggttttcctcggtgacagtctgtacggtagatagtcgaatgaatttatcgcttggtgtacagataactgtaaatacagccgacaaacagggctccgcctacgatgttgccgaatgtggcaggaatgagatttgccaagatgaaatcgctccaacttatcgcagctccttgcagcatgcctaatgggataaagaacatattagctatgctgtgttcgtaacctatggcgacgaaacacatgaccggaaaccagagacccatcattttcccagcggtggagtgtgcactgaatccaagccagacagcgaggcaaactaaccaattcgctccgattcctttgaggaagacgacccacccagacatgtctactttggcttgtgcgatttggacaatggcgcttttccacgggtcggcatcaacgatgcccgtacaccataccattatataaacgaagaaaatcgctcctatgaaattgcctatatagacgatcgtccagtttttcaatatgggcatgattccgtatttcttcttcataaatccgggaatcagcacggcattgttaccggtgaaaagctctgccccggccaaaacgaccaagataagtcccaaagggaacatgcaacctgacaatagtttttgtaaccccggatttcctgctgtccattcggggaatccgtatccgatgagtagggagagaagtcctcccatagcgatgtaaatccctgccagcattgctgcgacgagcgttcgaggaaaggataacgagattttattcagtgcagcccgttcggcttgggctactatttcggcgggtgtagaaaatgacatgataaatttgtaattacgaggataggagacggttctacattgtcaaaccacaaacaagatttaccttttgttatctttgttatagcaaccacaaatattactttgattgccacattttttattgctggaaattcgtcatcaaaggtagacaattaaaataatatacgcactactttatttgtttttattataaaatattgtttgggaggttggcggggggattatcgaggaaaatacttagaggaatatagtaaaaacggctgtcgattttctatcggcagccgtttgggtgattgggtgtaccgacaaataagtaaatctatttatcggccagttaagcatgaatttgttttatggctatttgacgagtactttggtaactcctttttctgtatggacaaggtagcagcctgcgtgctgcatgggaatgacttcgtaatccgtatgcaaagaggcattcgttatcgttttaccatcgagcgagtaaacggtgacctgtactcctttcaatccggtcaatatgatgtttcgtccttcgctgtatatcgagctgttgtctgctgtgttatctgctataccggtactgccggaagtcaaggtaatgttgtctatggctatgcgtgcaccggctttttctgttttcccacggaaacctaactgtatgcgtttattaccggccagttggtcgagcgggagacttactttggtccattcgttagaaccgttcgattgaagagcctcgcttgctgcttcgtagattgtgccgtttacggtggtttctactgtcagttctgcgttttccgtgtgcaggtagaattcaagtgtgagtttgtcttgcccggcaatgttgataataggggattcaaggcggctgtcatctgcttccgcttttttatttaccaacatggcgtagccgttatcttcatcttgagcgtccagagaaccgccgttctgatacataccccacgtatcatctccgcctacggtagctaccgaccatgtttcggtggaaacatttccttgggcaaacgattcggcgaaggggaatgcgagaggcgtacccaacataatgccgaatggggtgtaagcacccttacctccggcagacacggcgcagatgtatccttgtgtgtaagtttgtttggtaagcccggcagttgtcatgagataagaggtttcttttatgccggtagccatgtctattatactgccgaaaaggtatgttccgtagttgtaagtcagttcttcgggattgatgaaccctccgttggctcctgtttccgccggggcatcccacgtcaatagggcggcttggtcgttttcatcgtcccaactggcaatgaggttttgtacatgttgcgggatatccgtgccgatgaaaacagacttttcggcatcgcgcccgcgtccttgttcatcgtacacgatgacgttataatggttcataccttgcacgccatcgaccgtgaaggagtattctttccctttttccacttcattttcagttaggataacgttcccttccttgagaatctcgattttggagagggtggtgagttcatcgccattgatggctttggtcggggctttgaatgtcagaacagctttcaagacgccggtcggatcgggaatggcggtgaagtcggttaccgaatcgggagcggtggtcggtatgaacggctcgataacgatgtcgtctatgtaaagcagatacataccttggctggtgtggtggaagccgaagtagtaagtgcctgcttcctgtacttcaatgaccgatgacttttcgaggtaagtgtcaccgctgactgtgtagtcgccaagcgcattaagcataccttcaaccgtgttttcggaaccgaatgcggtgctgaaactttctgtgtagaattcgccgtatccttttgttttgaatgacagtttatacagataatccgttcccaattcgatgggaggtgtgatgatccagtcgtcggcgttcttgtctaactggtcgcttccggcggcattgtttatccaagcccaagtcttgccgtcttcgttggcatcgataatggtgaagatgtcgagtgcgctggcgtggtcgaacgtttctttgaattcacccttgaacgccgagccgaagcggatgcggttcgattcggtggcgactcccactttttcagctaccgctgttaccgtgtagtagtaattgcccagcacgtctggcaggtcttccgtgaaaacggtcgccgtatattcggcgtttatcgtatcattgccggggtagcgcacgaggatatatttcagtagttcggcgtcgaagtgtccgccgttggctccattgacaggagcttcccagcttacggtggcatggttgtcttctagtgtgaattgcagattacctacggctgcggggctatctacgccggcgtagatttcgattttgctttttacaccgtcaccttcggcgttcgatacgaaggcttccactttgtgcgtaccttccgtaaaggtgtaaggtgtggaaaattcggctccggcaacgactgttgcgttttcgagcgtgagcttttggtggtcgacgtagatggatacctccaacgaaccttccagcttgtctccttcgaatgttttgtctggggcggtgaaggtaatgttggcatctaatctttccggcgaagtatagtttacgctcagcttatcgacggctgcgggtgcttgaggggctgctgccggtggtacagtgtaaagtccgagcaggacgacggtttcgtcataatcgctcacgagtgaagccttgccgttgtcgaggttgacttcatagagggcggattgcaatttgttgttgatggcagcccaatacattttgcctgtgttcaggtcgatagttgcgctttgactgtttgagggcatgatcccagtagcgccgatggaggctgccgtgcccgtggcggtgttgatagtgtaaaggttgccatcatcggctatgccgtaaagcgtcccttctttgtcaaaagacagagtgaagtacatgcggtcgccggtgcttgccacttgtgttggttgcccggagagtaggtcgaccgtgcagagcctcgtcgtacctgcttcggacatgaattgcccgtaaatggttttggtcttgctatcgtaagcgaggctgataggatagttgtcgtacgaggctttgagtgtctgctgtatgtctcgcgtccagccgtccgtgtcgaagaggtagtaattgacgccatacacggtagagccgtaggtcgtgactcggtatccgcagaatttcccgtcggcatagacggctgccgacagattgaaatcggctgctgttttgactggcgtgaaagtggttccttcctctgcggggaaggaataaatgccgaattccccattttcggaagtactccacttggaagagtaggtcatacagccgaacagttctacactttctgcgaaagcagcggttttcagggaatgacggatagcagcagtttgcttgcggattgttttctgcgggttgttttctatggcggacagtttctctaactgtgccactttgttgtttgattgggctttcaagtctcccaaaccgtttacagtgcatacaagcagcactgccaaaaacaaatttaaaactcttttcatgcgataactaaaatttgatgaatatacgatggtttttaatacctatttattattaaagacaaaaatagttgatgaaaagaaagcagaaaaatataaatcttctcaatttgtcaattttgataatttgcgaaaagattgagggtatgccgggaaatatcggctgaggcatacgactctggttggataaagaggattagctgtgtttaaaagtgggttgagagggattacgagtccaaatgtagtttttttatttcttggcggaaacgggaaggaggaactcccatttctttttggaatgctctgtaaaaagaagaaagtgagttgtagccgagcgaatcggaaagcactttcaaaggaatgtcattttcaggctcagataacagagcgagcgcttcccggatgcggtatgaattgatgtattcggagaaagaggtgttttgctccgtaaacatgcgcgacaagtaggtgcggttggagtgaagccgttctacgagcatgtcgatggagatactgttgctgcggtataagtgttcgtcgttcatcagcttttctacggcttcaaagagtgctttgtttttctggccggtgtttaccagatcggttttctcgtcccgttgttcgagcagttgtctttcccgctgacggtgggtgtcgtataatatcaccagttgccggtacatgtggttcttccgtacataaagtacatatagagctatgagtatgacggctatgagcccggtcacgaagacggctaattgaagtttccggtttttttcagacaagagcagttcttttcggctaagttctttttcagctttttctgtctcgtagtttagtatcatgtggctgaatgaacgttcttgttctatattaaaaatgctatcggcgagggattgatgtctttccttatgttgggatgccatagcaatatctcctttttcttgaaataactcggccatacctttgtaaaattggaggcggtaatagtaatggttttgctgttcggccagtataagcccattttggtaagctgtatttgcttcgtcgtaacgtctttccgctttcagaaagttgccgtaataaaggtaggcttcggtgagtacgtctatattggtgcgttgtgtgtggtttagtacttttcggaaatatagttcggcttgttgaggttttccaatggcggcaagtatgttcccgtggataacgtccggttcgtcggtgttagccatatgtgtcgcaatggcggtggcttcagatatataatgtagcgcttcgtcataatttttcgaaagatagtacatggtggcaacgttcaatgcgccgagaaagcgtacataatcattatgtagtttgcttcccccttcgtatacctccaatgcgtattttatacctgaggggtcgtttcgaaggtagtaaatcctcgtcatattgcttaaaatgatataataatttgttttatcctcacttgcgtcggcatattgcagagcttcttggaagtaggcaagggaggcattgtaattgagtgtcgtattgcgtgcgtttattcctaacccgttggctataatggtctgtatataggtgtcgtgatgttcttctacatagggaatagctgcattaaaatacgtgaacatggagtctgcttggccggaaagtatataagcttgtccgatgtatgcgcctacataggcttgtgttttcttgtcgtggttggcaatggctttacggtagtaggttttagctgtgtctatcagtatttcgtattctcctttacgcacgtactctccccaacttttgatgagtgcgtaggaatctgtatgtgttgcaggcgtctgtacggtcatggcgttcttctcctgttccttacagccggagagaagcaatattatcagaaatatgtatgataaaatgctgttcattcgaatgctgattaagagcttaaagtcgggtaatcattaccagtttatcactctttttgtggtatgtgcaaccggtaggtcttgtttgttatttttcaataatgtcgtacctttcgacaacaaagatagtgcaaagaaaaagcacaggcaaatttaccggttcataaaagtgctgtgcgatagggcggaagtacccgcagggcgaggggaatacattctacaatcaaacgtttttttgcaattcctctcctctatattgtttcgtaaagctacggaacatggcaggggagaggtcgatgcttgactttttctccgttactgcctgtatttttcgatatatccattgaattaacccctccgtcacttcgtgccacctcccctatatttttgctatgcaaaacacagaggaggaggtttaatgcccttctatctcattatttatcaatgagacggatcgtgtttgtccttctccctcgccgtgtccaatggcattgcggggtatcgtgtaaaaaaatatagggaagagaccgaagaaacggtagttcctgaggagagggtgtgaaaaagatggcataagatttttgactgtaagggttaaccccctcgtcctgcggacactccccctatattcccttacggtaacacagggggagagggctaaaatgcatttcgaacatctttaaactcctcccttgccgtgcctcgtagccttgcggggtgtggcgcagccataggggaggtggcacgtagtgacggagggattgagaagatattatataatctttgattgaggagttagaggtataaaacgggtaatccccattaattatcgacagagccctgattgtttttgatcgtttttttgggtgtggatatatgcctctgccccgtattccacaagaaaatgggatacagggggttgagatgtgtatttggagaatgaaatattttcttttattcccgcctattgcagccgaaagaggcggcatggaatccgggattcggttcaccgatcggagttcttacgtaggtttcgcaccagatattgccggaaagaggcgaaaggggattgggtcgatattccggtgtatcgatgtgattcgtaaggttcttttcccggttcccgaatccattttctaatgattcggaggtgtctccgggttttctttcgtatgaatcggattctttttcttctctgttttcgggggtcgatgcggtttccgaggcggctttttcgttctcttcgttttttctttcctcttgtttcctgagcgcttcgcgccggcaggcttcgaatcgttcgcgttcctcccgttcctcgggtgtgtcgaatatctcttcgtggtcgacaaggtactgtgtggactcgatgtcgtatagcccggctttccgaaagagttggtttctcttttggtagtgccaagcgagtgttccatcggcttgcattttcttccggtcgcagcggggacgttttctctcttgggaatgtctttcgagcttgtcgatacatcgaaggacggcgagcagggtcaaccggtcctttttaggatcgatttcgaggagcatcttgtagtacttgatcagggctacttgacggtagttctcgatttctcctcttaaatctatgctcgtatcgaatcttgtatctatcatcgctcgtttgttttttcgacaaaggtatattcttgttgtcggcagtttatggcatgatgatactttgatgaaagagacgttcttaccgttttttatttttgttttttctgttatggacttgtcacaatttttggaaaataaatttataatggaacgactccaatgccggggcgatccagcagtgttatttttccttcgacaattttcactccatcgaatagatcgttggatataagcaggtttccgtcaaggtcggcccagtgggctaacggcgacagttgtgctgcggcagagatggcacaggaggtctcggtcatgcaaccgatcatcactttcatatccaaagctcttgccaatatggccattcggtaggcttcgcgcataccggtgcttttcattagttttatattgataccatcgtagagcccgtatgcccgtcgtacatcgggcatacgttgcaaaaattcatcggcgatgataggcagaggagcgcgttcgtggagccaagcctgttcgtctatcttttctttgggcatgggttgttccacgaacaggcagttttgttcactaagccattgtatcatttcgagcgcatactccttattgtcccaaccttgattgacatcgacacagatggggcggtcggtctctgaacgaatgatttttaccaattctttatcgttgtccaatcccatcttgattttcaatacattgtagggggatgcttcccgcagtttctgacggacaacttctgcggtatctatcccgatagtaaaggaggtatcggggcatttttcgggggagagtccccatattttgtaccacggttgtcccatgattttaccgacgagatcgtgcaaagctatatctaccgatgcttttgccgaccggttgtcgggtgcaacggagtctacatagtcgagaatttcttccatgcggaaaggatcggtaaactgcttcaagtcgagttgcccaagaaagcgacataccgattcttgggtttcgcccaaataaggcggcatggaggcttctccatatcctgtccattctccgaaacggagttgtacttgtacatcgggggtgtgggtacgagaacttttcgccaaattgaaggcgtgtttcaatttcaagtcatacggtttgaaagaaagttgcaatctatctgaacttgtttctttggatgcggaagttccgcaactattaaaaagtgcgggggatagtgtcaatcccaatgtgcctatcgcacttttgcgcaaaaaatctcgtctgtccattttcagtttatttttgctcgaagtaccacgggtgtcgttttacggccgtgattcccggagtccctatcttgttcacgactctgctgataccgaggagcggaatagcgtaatagtcggtatcccgagcatcgatactgtttattttgacttgtcccgaagagtgtatatatttcccatcgttcaggtagagagccacgtgcgagactttgccgggggcgttgccgaagaacaggaggtctcctgtctgacattcgtcccattgttctgccggcatgatgtcgccggtgagagcttgttgcgaagcatcgcgggagagaatgattccggcagaaaaataggccgttttgacaaatcccgaacagtcggcacttttgaccgaagtgccgccccagaggtaagtcgttcccatcattccttcggcggtctgtatgattttattcatgtttacgggagtcgatgcccactcggagagttcgcgacattcgtcgtgtttcaagaatccggttcttccatcggggaaagatacgggtatgaacttttttcccgcttttcctgcggcttgcagaatacagcccgatacgatatcagacacggtctcggcatttttatctgcggaagcatatacatagccttgcagtccggtatagacatatcgggtggcatttttccattcggtccactcggcagtagtttttacggagatcgaatttgcgattatccaactgatgtaattatcgggagtttgcactctgtaccaacccttttgctcttccaagatgagcaggggcgtaccgagaatagcctgagagaccatctcggccgaatgtctcggctcgcttctcaaatgtgcacagcagactgtgacaatacctcttgtcttttcgccaagacgacggtcgggcagcaactttatcgcatttatataggagattccggccgtgtcgagcgttcggagcaatgtttcgacggcttgccggttgtcgcactttcctttcagaatatggatagaatcgttcaatagctcgctcgataccgtataaacggctgtgcgggaatcgggtgcatattgccgtccgattcgttctatccaagtttgtatatcattggactgggcatttgccataatcgggataatcaacagaaaacaaagtatgatctttacagtcgatgtgttcatgagggtgttcgaatagtaaacaattatagcgaaagataagagccgtgtaaacggaaatcgcatttccgacttggctatgccgaaccgcttcttatcttcatagctacaaatatattgaaaagccccgatagatcgaactttacgacccgataaatttcatctgtttgttacaatccggttatcggggtaaagcaatctcgggtagtgtccaaaaatgtgcttggggaaaatgttcgttcagataggttttcaaatattcctcggtgtctttgtctatccgttcgtctgttttcggaaaggtattgtagaccattccgtaaaggggaatattcctatttaccagcgcttcgatagagagcagcgtgtggttgatgctacccaaacgcccggacgttaccaagataaccggcagcttttggtcggagatgtaatcgaccgtcaggtatcggcgagtaataggaaccatcaaacctccggctccttcgagcagaaccacgtcgtacctgctttggagtatccgggtggactctgttattttttctatgggaataatgcggtcgtctatctcggctgccaaatgcggagaagcggggtaggaatagacaatggggaatgtgattcgctccttatcctccggggtgaacggtattcccataatttcccgatgcaggtctatgtcttcggagtggcctacattcccggtctgtatcattttttgagtgatcgttttaatccctttgctgttccattcacgtgccagccaccctgtggcgtaacttttcccgatgttggtatctataccggtgataaaaaaagttcctttcatatctgtgtttttttatgtgcgacgatgtagacgggtcgataggtgagcgtgatctcttttttcccgtcgaaagtctttctatatcgctttataaagtcgaatcctttttgccgggagtgtcccgaaatacctgtcacaccggtgtttttgagatgccggagtaactcgacgggagtgtcgaaacgaagggtgcattcctcttgttcgaaaagttcgacccgaaagtgtttttcgaacaatcgttttaaatcggcagactcccaatagggcatttctacggtcattaaagattgtatttcgggcagattgccggctgcgaatgtgctgacggcgatcgtgcccgtatcggacaaattgccggatatgcgtttcaagaatccttccaaatcggtgaaccattgaatcgtcgaagcggaggcaatcaaatggtatgtttcgtcgaaatcgattttttcggcatcgccttccatgaaattcaactgtttgaacggtagtgcggttatgtagtctttcatttcgggcgacaggtcgtttatcgtgaatcgggcatcggggaatctgtcgatgagacagcgggtcagtttccctgttccgcaacctatttccagtatattgtcgatgcatttgttcaaacggctcggaatcttgtcgttcagctgtcgggctatccggctttggataaggccttcccgttcataggtggaggctgcgtttccgaagctgtttttaatggtcgctttgtcgagcctattttccaacacaaccgggcggaaatggaaaaaatggggttcgtccagctcttgaacgaccgttgtcccttcccatgcgttcacttggtttcttgcgggaaatatgaggtctcttgtcccgattatcgctttgtcccaacggaaacggggacgagggtgcagggttatgttctcgcctatggcacgcaattcgtcgtacaagctgttcatgtctctttcggggaaagcctccttaaaatcgtcgaggtgttcgcaacacatgcgccggtagaattttttcaagctcgcttcgttcaaatgttcgagagtcgcccggaatatttcgggggggatgcctttctcgatgtcgattccgcattcggttccgttgatggccgtggcgtgtcttatggggagtcctttatcgggtaagaccgttgccgccgcccaaacgccaaacgaccacgcatagacttcgatgtttttatagtcgaggaatggggtggtgtcgaagttcaggtcggtgtagtcgtagcagacacaacagtcgcagcctatgtgactcagataggcaaacggatgcgtatccattccccaaccggcgaagaggaggattaagtcgtcggtgtgtctgcgagaaatgaaagtttgtatcataggcccgatgaaatcttggttaacgtgtgaatgagccggtctatctccgtatcggtatgtccggcgctcagcgaaatccttaaccgggaggttccttgcggtacggtgggcgggcgaaccggcaacagataaaagccttcgtgctgtaattttaaggcggtttgtacggtgcgttccgtttcgcccaatacgaaagggacgatgtggctgctgctgacaatcgctccgttcaacggattgagcgcttgtcttactttgtggccgattgcctccaaatgttcccggtgcgattgcatatcgacgattttatcgatgatgaacagcgtccattcgagattgacaggcggcaatgcggtcgtaaaaatcaacgtccgcattttgttgaccaaataccgtttcatttcatcggagcagataacgaatgctcctaccgaagcggcagcttttccgaacgtaccgaccaagaaatctatctctttaataacgtcttgctcttcggcgcagcccaatccgcattgacctcttacgccgaaagcatgggcttcgtcgacatacaggtaaatattgggatagtgtttcttcaacgccactaagcggggcaagtcgcattcgtcaccgtccatgctgaatatgctttcggtcacgatgaataccgcttcgtattgcgaggccgactcggaaaccaaccgttccaactgttcgtaatcgttatgccggtagcgtatgcagcgggctttggagagtcctatcccgtcgactatgctcgcatggacgagtttgtcggccaaaatcaaagagcggttgtcggtcactgccggcagaatgccgctgttggcatggtaaccgctgttgaatacgagagaggctccggctttgtacaattcggcgagccttttttccaatcgagcgtacacggggaaattgccggtcaacagccgagaagatgtcgaggaaaaacgaacgtcacggggattcaggttttgcaaaaacaccttttttaagtccgtgtcatcggccagtcccagataatcgttcgaggagaaattcaacatggtgttcccgtcacggacgatggacaggccttgtgcatccactgccggcaaggagcgcaaatttccttgtcgagagagttgttccaattgggaagaataggtattcattatcgcagtgtttttactacctccaacagagccgaggtgagtgtggaaagttgggactgggttatgatgaacggcggcatgatgtataccaatttcccgaacggccttacccaaatgccccgctcgacaaattgtttctgtatggaagccatatcgaccggttttttcatttcgatgactccgatagctcccagcattcttacgtcggaaacttggggcagtgtcgccgccggacttaactcccgttttaattgggcttcgatggcggcgactttctctttccagccggaagagaggaggagagagacggacgcacaggccacggcacaggccaaagggttacccatgaaggtgggcccgtgcatgaatactcccggatttccgctggaaatcgtgtgggcgacttcgtgtgtcgtcaaagtggccgccatagtcatgtatcctccggtcagggctttgccgatgcacatgatgtcgggggtgactcccgcatgttcccaagcgaacagtttcccggtgcggccgaatccggtggcgatttcatcgaaaatgagcagcaggttgtatcgttcgcatagctgcttggcttcccgaaggtattgcgggtgatagaaccacatgccgccggctccttgcacgatgggttcgaggataagtgccgccaattcttcgtgatgggcttctatggcttcccgaagaggtgcgatgcaggtgggatcccattcatcgtcgaatcggcaggagggagaagggacaaaatagcgggtggggagcgcatctccgaaaatggagtgcataccggttaccgggtcgcataccgacatggcattccatgtgtcgccatgataccccgaccgtatggtgatgaggttacatttagagacctttccgcgggcgtgccagtattgtatagccattttcatggcgacttcgaccgatacggaacccgaatcgcaataaaatatgtgttgcatggacgagggtacgatttgcaaaagcagtttcccgaggtcgatcgccggttggtgggtgagtccaccgaacatgacgtgcgacattttttttagttgctcttccgccgccttgttgagcgtggggttgttgtatccgtgtacggctgcccaccatgacgacatgccgtcgatgagcctttgtccgttttccaattctatatataccccttccgctctcttgacgggatagcagggcaggggattaatggtcgaggtgtagggatgccatagatgttgggcatcaaaattatccataagcaagcgtttttagaatatgaaaaatccggtataaagcgaagctgccgctgttatcccggaatatatagatggtaaatgtctgtttattgtcgcacgaatgaccggtggagcagcttgtcaccggagtatctacggtactctccaaaatttcggggagaaaaaaacttcccgccgtgtgttcttcttcggacggtttatccgaacgttccatatttcccacgacaatatcggtggaagttgtggaaagtccttttttcaaagacttgtcggctatttccttacggacacttcctatgtttacacatttgcctatactgcaaaaggtagcatagttgtggcgattccatcggcggaaccataccctgtgaaccgataaggaggtcgaagttttcatatcgcaaagttactacaaaaaagtgaaatgcggaaagatatagtgatagaattgagttacaagggttttagttgaagtggcgaaaattcgtgaagccattacaatccctgccaaagccaaatcctgacgccgcaacgttacttgttcgtaaccatgcccgaaaatgcgacaaacgggtacggatgacgaaacaagacgctaaggaatagtgagttaccgacaactcacgcgaaaaatttgcttacggaaaaagattgcgccgttcctccccgttttgcgtaccgacaccggactcttcaccaactaattttgaaaccaaaaaaattaaggacgatgaagagtacattttcagtaatctactatctcaagcgtcaggtagtgaaaaaagacgggacagttcccgtcatgggacgcatcacggtggacggcagccagacgcagttcagctgcaagctgactgtcgatccgaaactgtgggacaccaaagggggacgtgtcacgggcagaagcacggcggcactcgaagcgaaccgtatgcttgacaaaatgcgggtacgcatcaacagacactatcaggaaatcatggagcgtgacaacttcgtcacggcggaaaaggtgaaaaacgcctttctcggactggaacaccgctatcacacgctgatgcaggtgttccgccagcacaacgaggactatgagaaacaggtggaggcaggcatgaaagccaaaggcacactggaaaagtaccgtatcgtttacaagcacctgcaagagttcctcgacatccgctaccatgtgaaggacatcgccctgaaagagcttaccccggctttcatctccgacttcgagatgttcctgcgcacggacaagcactgttgcaccaataccgtctggttgtacgtctgcccgctacggacgatggtattcatcgccatcaacaacgagtggctgacgcgcgacccgttccgcgagtatgaaatcaagaaggaggaaacgacacgcagtttccttaccaaagaggaaatccgcctgctgatggagggcaaactgaaaaacgccaaacaggaactgtaccgtgacctctacctgttctgcgctttcaccggattgtcattctcggatatgcgcaacctcacggaagagaatatccgcacctatttcgatgaacacgagtggataaacatcaaccgccagaaaacgggcgtggtgtccaacatccgcctgcttgacatcgccaaccgcataatcggcaaataccgtggactgtgcgagaacggcaggatatttcccgtcccgcattacaacacgtgccttgccggtatccgtgccgtcgccaagcgttgcggcatcaccaagcatatcacgtggcatcagagccgccacacggcggccacaacggtatttctctccaacggcgtacccatcgaaacggtcagttctatgctcggacacaagagcataaagacaacgcagatttacgcgaagataaccaaagaaaaactcaatcaagacatggagatccttgcggcaaggttgaacggcattgaggaatttgcaggttgtaccatctaaaaaagagaagccatgaagcgtgacataatcatcatagaggacaaggcggtcagcgtaaccggtaacgaagtgtggatgaccgccaccgaaatcgccggactgttccatacgaccgtcccggcagtgaacgctgccatcaaagcagtccgcaagtcggacgtgcttaacgactacgagttgtgtcgctacatgcagcttgaaaacgggctgtacgcggacgtgtacgcgcttgaaatcatcatcccggtcgctttccggctgaacacctacaacacccacctgttccgcacatggctggtgggaaaggcactctcaaaagataaccggcaggcatacgtgatgttcattcagaacggaaaggtcgggtactgttaaaaacagattccccataagacaagtaaacgggcagcaccacaaaaggtgtcgcccgtttactttttcatgcaaccgcctcactccagcggcttgcggtagttcgcttccagcacctcgcgcagccccgtttccgggtaaagcaccttccctcccaaaaggataaaaggcaacacgcggttgttgcggtattcctgcaaggtgcgtcggctcacacggagcagttccgccacctcgccgtccgtcaggtaacgctccccgtccagcggaggacggtaactttccagaaatgcggacagccatttagagcctttgcgcatatcctgcatcacagaggctatcggctcgtcttccatcgtaaaaacatcgttggtctcgttcatcataacttcggattcagtgggtgaataaatcaaatcatctgccatgcggatagagcgtgccgacaagcggtatcagccgcttcacctcctccggcttgtaatagaacctgcggtttatctgcgagtagccgataagccgcctgtcgcgcagcgtctgcaacgtgcgcgggcttattctcaactgcccgcagacctcctcgcccgtgagccatctttccatgcgccccgtgtcgcttttgcgcctcagggcggcgaccttctccgagagtgcgccgaatgccgccaccatcatctcgaaagtctttttctcgatagatactatttccatattcatgcaattaccggtttgcccgcaaaggtaacgatgcagcccttaacacgtaccgttttccgctgaaaggctgcctgttgcgccgtttgaccgggttatggagccatcttccgtaaaaatcttacgtgagtcacgtagtgagttgttaaagccccttttgtttattgccgaattttgccgcagaaacaaaaagaaaggactgaatatgaaagtgataacgatggaaagttccgtcttccggtcattgacggaacagatagcggagattgcggcacacgtccgtgccgcctccggcgacaagaaagcggcatcgtccgacaggttgctcaccacacgcgaggcggcgcagctgcttaacgtgagtacccgcaccctccagcgtatgcgcagcgagcaacgcatcgtctatgtcgtgcttcgcggtaaatgccgctaccggcagtctgaaatcgaccgcctgcttgatgagtgtaccgtcaacgaggacgccgcgacaccgcaggagctgaaacgcaaccacacgctacgaacgggaggcacacccaaaggaaggaggacatagctatggaactgctcacacgaaacatcttcgagggctggatgcagaagctgatggaacggctcgaccgtcaggacgaactgctgctggcaataaagacggaggaacgacagcccgccctcacggaaagcatccaccttttcgacaatcaggacctgtgcatgctgctccagataagcaagcgcacactgcaacgctaccgcagcgtcggtgcattgccctacaagacactgggcaagaaaacctattacagcgaggaggatgtgctgacattcctttccaaccatatcaaggacttcaaaaaagaagatatagccttctacaaggctcgtatccataatttctttcataaataacccattaaaacatttttagatggcaaagaaaaaagacgaaaaggacgtgctggtagtccgtgacgagaagacgggcgagattagcgtggtagccgggctgaacgcagacggtacacctaaacgcacccccgcgaaagcggagaacgcgcagagtttcctgcaattcgaccgacatggcgacgtgctggacaacttcttcaagaacttcttccggcagtgcaaggaacccagccgcttcggtttctaccgcatcgcggcggaccaagtggattccatgctgggcgtgatgaaagacctgctccagcatccgtaccagaacaaacaaatcctcgcaccgcacaaaatcgacaccttcccctatcaacagcaggtgatggaagagcaagctgcgcaacagacagagaaacaagaacctcaaaaacaggagaacatggaacaacagaaagaacagcaacaggacaattccgaacagacgcagggcaaacggggctaccggcccatcgacgagagtaaaatcaactggcaggaactggaggacagatggggcgtgaagcgtgacgaccttgaaaagtccggtgaccttacgaagatgctccactacggcaagtccgacttggtgaaggtcaaaccgaccttcggcggcgaatcgttcgagctggacgcccgcctctccttcaagaaggacggcgaggggaatgtcagcctcgtgccgcacttcatccgcaaggagcagaagttagatgagtacaaggaacacaaattctccgacaatgaccggaagaacctccgcgaaacgggcaacctcggcagggtcgtggacattgtggacagggaaacgggcgaaatcatcccctcctacatcagcatcgaccgcaagacgaatgaaatcacggacattccggcgagcaaggtgcgcatcccggagcgcatcggcaagacggaaatcaccgcgcaggaacgggacatgctccgcgccggactgcccgtgcgcgacaagctcatcgagcgcaacgatggcaggaagttcgtcaccaccctgcaagtgaacgtggagcagcgcggcgtggagttcgtgccgggaaccggcaagtcaccccgtaccgcacagacgcaggaaaccaaaggcgacacctcgaaaaatcaggcgcaaggcggggaaaatgccgaccagaccaagaaggagcaacgccgcaacacgtggacgaacgaggacggcagcatccgccccatcagcaaatggagcggcgtgaacttcaccgaacagcagaaagccgactatgtggcgggcaaggccgtgaagctggagaacgtgaccgacaagcagggcttccatgccacgatgtatatcaagttcaacccggagaagggacgcccataccgctacgacacgaaccccgatgtcgggcagcaggtcgccccgtccaacgagagccgcacgcaggtggcggtgaacaacgagggcaagaccaacgaggcgacaaagaacctgaaagagcctttgcagaaaggtcagacagccccgaagaccgcccgccagcaacagcagcaggacaaaccgaagaaaacgggcaagggcatgaaaatgtaatcccgtgtccgccactgaatccaaaataaaatccaaagtatcaacaacaaaagcaagaaaacatgaagacaatcattgcagaaaagccctccgtggcacgtgaaatcgcccgcatcgtgggcgcgacaaaaagagaggaaggatatttcgaaggaggcggctatgccgtgacatgggcattcggacacctcgtccagcttgccatgcctgacggctacggcgtgcgcggattcgtccgtgacaacctcccgattatccccgacaccttcacgctcgtcccccgtcaggtcaggacagagaagggctacaagcccgacagcggcgtggtgtcgcagataaaagtcatcaaaagactgttcgatgcaagcgaacaaatcatcgtggcgaccgatgccggacgcgagggtgaacttatcttccgctacctctaccactacacgggcagtaccactcctttcgtgcgcctgtggataagctcgctcaccgacaaggctatccgcgagggattgcgcaacctcgaagacggcggcaagtatgacaacctatacctcgccgccaaagcgcgaagcgaatccgactggctcgtgggcatcaacggcacgcaggcactctccatcgccgccggacacggcacgtattccgtcggacgggtgcagacacccacgctggcgatggtgtgtgaacgctactgggagaaccgccgtttcacgcccgaagccttctggcagctccatatcgcaacggacggttgcgacggcaaggtcgtgaaattctcatcctctgaaaaatggaagtcgaaagaaccggcaacggagctatataataaggtaaaggcgacaggcttcgcaacggtaacgaaagccgagcgcaaggagaaaacggaggataccccgttgctgtacgacctgaccacgctccagaaagaagccaacgccaagcacggcttcacggcggaacagacgcttgaaatcgcgcagaagctctacgagaagaagttgataacctatccgagaacgggaagccgctacatccccgaagacgtgttcgctgaaatccccaagctgctcgcctttatcggcacgcagcccgaatggaaagacaaggtgcgggcaaaagccatcccgacacgccgcagcgtggatgacggcaaggtaacagaccaccatgccctgctcgtcacgggagagaaaccgctcttcctctccaaagaggacagcaccatttatcagatgattgccggacgcatgatagaggcattctccgaaaaatgcgtcaaggacgtgactgctgtcatggcggaatgtgccggagtggagtttaccgtgaaaggcagcgtcatcaggcaagccggatggcgtgccgtctatggcgaggaaaacaaggatgaaaccactatccccggctggcaggaaggcgacacgctgacactgaaagcctcttccatcacagaagggaagaccaagcccaagccgctacataccgaagccaccctgctgtccgcaatggaaacggcgggcaaggaaatcgaggatgacgcactgcggcaggcgatgaaggactgcggcatcggtactcccgccacacgcgcctccatcatcgaaacgctcttcaagcgcggttacatggaacgctgcaagaaatcgcttgtccccactgaaaaggggcttgcactcaattccgtggtgaagacgatgcgcatcgccgatgtcgccatgacaggcgaatgggagaaggaacttgcacgcatcgagcgtggggagctgtccgccgataccttccgcaaaaagatagaggcgtacacgcgggagattacctccgaactgctctcatgcgacaaactcttcggcagccgcgattccggttgcgcgtgtcccaagtgcggcacgggcaggatgcggttctacggcaaggtggtacgctgcgacaacacggagtgcgggcttctcgtgttccggctgaaagcgggacgcaccctgtccgacgatgaaataaaagacctgctcactgacgggcacaccaagctgctcaaaggcttcaagagcaagcagggcaagaacttcgatgccatagtcgcctttgacggggattataacacgacgttcgtgttcccggaaaagaaatgcaagtcttcctatccgaaaaaaaggaaataatcactaacttttgataagttaggctgcatctcaacaatagaaacaaacaagtttttttcgtattgtcttcgatttgcactaactttgccacttgttcagagtaatgaattgttcttcaataccggattacactcatactttggatttagtggtggcactcggagggataccgagtgcctttttcttccttttttcaaccgattatcccgttaaatatcaatccactaaactccaaagtaatgaacaacaagaagaaaaacgagggtcaggccgacttttcctattacggtctgtacctgctggactatctccgcacgaacaagtttgaacaggctgatgacactgctttcatacgggaacgcgccgaccgtgccgccgaaacgtatgaaaaggctcggctcgaaggctatcccgccgacggtgcgcaggaactggctatggacacgctgctgcgcgggctgcgttattcccgttacgacatcctccgcgaagtcgtggagaacgagttttccgatgaagtgccggaagagaagcgtgaagcctttatccataaactcctgccgcttgtcggcaacgtgttctccgtctatgacctctcggacgacaacttcgccctgtcttccgattacgacctgctctacacggagctgacgggggcaaccgtcctttacttagacgaatatggcgtttaaccgcaaacagaaactgcgggacaacatcgaggcgatacggacggcattcatccttgacagggaacagagaacggcgacaaccgaagagcgtgccatactccaaaggtactgcggtttcggcggtctgaaatgtatcctcaaccctgcgaaggaactgacggatgccgtccggtgggcgaaatccgacctcgaactgttcgccccgacggtggagctgcacaggcttatccgtgagaacagcaatgacgaaacggagtacaagcggtttgtggattcgctgaaagcgtccgtgctgaccgctttctacacccccaaagagataaccgacacccttgcggacgtgctggcggattacagcgtccgtcccacccgtatgctcgaaccgtcggcaggtgtcggcgtgttcgtggattccgtgctacggcacagccccggtgcggacgtgatggctttcgagaaggatctgctcacgggtacaatcctgcggcatctctatcccgacaagaaaacgcgcacctgcggttttgagaaaatcgaaagaccgttcaacaattatttcgacttggcgatgtccaacattccgttcggtgacattgccgtgttcgacgcggaatttgaaaagagtgggtccttcggcagacgatcggcacagaaagccatccacaactatttctttctcaaaggactggatgccgtgcgtaacggcggtatcgtggcgttcatcacctcgcaaggggtattgaacagcagcaagacctccgtgcgtaacgagctgttcagtcaggctaatctggtatctgcgatacgcctgcccaacaacctgttcacggacaacgcggggacagaagtgggcagtgacctgattgtcctgcaaaagaacctcagcaagaaggaaatgtcgcaggacgagcggctgatgaccgtgatacagacggacacgaaaaccgacctgaccgacaacgcctatttcatccaccacccggaacgcatcgtgcatacgacggcgaaacttgacacagacccctacgggaaacccgctatggtctatctgcacgagggcaagaccgcaggcatagccggggacttgcgccgtatgcttgacgaggatttccattacaggctcgccatgcgcctgtattcgggaacaatccggcaggcgggaacggaagagagggttgccgtacaaaaggaaatggagcgtcctgccataaaattggaaacggtacctccggcacaagcggtggaaactccgacggagaaaccgcaatccgcagaggaaaagccggagatagaacctcgtccgaaatattccgccggagtgcagctcacgttgctcgacctctggggcatgacggaagaggtcagccagcctaaaaccgccaaaaagaaaaaaacggcgaaaaaggaaagcccggcaaggcgcgttacgcccaagtcgcaggtgcagaccacacagaatgttacggctgtgccgacggcttccacccctaagaatgttacggaaaacaaagaggcgaaagcggacagtgccgccaagcctgccgacccggacgacatctatgcaaagctggactgggaaaccaatcctcccatcaacggcttctacgagatgatgatgggactcacgccggagcgcaggaaggaacttcgggagctggcaaggcagcataatgagaaacaggaaaacagaacggttgcgacggtcacgccggaagtaccacgtgaacacccccggcaggagaaaacacagccggaggttgccgccacacctgccgctaccgctgctccaccggaagcggtggcgacttccctttttcccgacatcgaaccggaaaagccgaaggaggaagtcgtggaccttacgccgcgtgcctaccaccgcacgccggagatgcacctgcgcgaagggtcgttagtgacagattggggacgtcataacatcggctatctgaaggacatcacaccatacggggctacattccagccgctcgacctgaaaggctaccagaaggagaaggcgttacagtatgttttactccgtgacgcctacgagcggctgtaccgctatgaatcgaacctgcacgaagcaaatgtccagtggcgtgagcatctgaacacctgttacgatgagttcgtcatgcgttacggcaacctcaacgccaagcagaacgtgaagctggtgatgatggacgcgggcgggcgtgacatcctttcgctggaacgggtgaagaacggaaagtttgtcaaggcggacatcttcgagcgtcccgtttccttcgcggtggagagccatgccaacgtaggctctcctgaagaagcactgtccgcgtcgctcaacaagttcggcacggtcgatctcgactatatgcgggagataaccgacagcacggcggaggagttgctcacagccctgcaaggacgtatctattacaatccgctcgtgaccggttacgagatcaaagaccgtttcatagccggaaacgtgatagagaaggcggaacgcatagaggcttggattggtgacaatcccgaaaatgagcgtatgcctgaagtgaaacaggcgttggaagccttgaaagacgccgaaccgccgcgcatcgccttcgaagaccttgatttcaacttcggggaacgatggattccgacgggtgtctatgccgcctacatgagccgtctgttcgacacggaggtgaaaatcgcctactccgcaagcatggacgagttttcggtggcgtgcagccacaagaacttcaagatatgggacgagttctgcgtgaagggctattaccgcagttatgacggtatgcacctcctgaaacatgccctgcacaacacctgccccgacatgatgaagtccatcggcaaggacgagcatggcaacgacatcaaggtgcgcgacagcgagggaatacaactcgccaacgccaagattgacgagatacgaaacggtttctccgaatggctcgaagagcagtcgccgcagttcaaggaacggctgacgacgatgtataaccgcaagttcaactgtttcgtacgcccgaagtatgacggctcgcaccagactttccccgacctcaatctgaaagggctggcaagccggggcatcaggagcgtctatccctcgcagatggattgcgtctggatgctcaagcagaacggcggcggaatttgcgaccacgaggttggaaccggcaagacgctgataatgtgtattgcagcgcatgaaatgaaacgtctgaacctggcgcacaagccgatgattatcgggttgaaagccaatgtcgcggagattgctgccacctatcaggcggcatatcccaatgcgcgtattctgtacgcttcggaaaaggacttttcgaccgccaaccgcgtgcgtttcttcaacaacatcaagaacaacgactacgattgtgtcatcatgtcgcacgaccagttcggcaaaataccgcagtcgccggagttgcagcaacgcatcctgcaagcggaacttgacacggtggaggaaaacctcgaagtgctgcgccagcagggaaagaacgtgtcgcgggcgatgctgaaaggtctggagaagcgcaagcacaaccttgaagcgaagctggagaaggtggaacacgccataaagtcacgcacggacgacgtggtggatttcaaacagatgggcatcgaccacatcttcattgatgaatcgcattatcagaacttttatgaatttcctaaatttcgcatcaagttgctgattcttattttgttgcattttaatatagttcggattatttattgagtgagttgttatgaaatgaggcattgtacttattacaagcacaataccccacattcgtcatttatgcaaacccaagaaaacctcaagttccattttaccttttgccgatttccatttcttaccaacgcacctctggttttcatcctcaagcgtttccaatgctttttcctcttgttcggtagttatgtcaagatataccattgtcgtttggatattctcatgcccaagcaaataagagatttgggcaatgttcatgccgttttcaagccaatgggatgctttggcgtgcctgaactgatgcgcatgtatgtccaaaggaacgtcactgcatttgccatgcgccatctttgcgtaccttttcagcattttattaacattttccgcagacatgggcgtgtatatacctctgctttttgaactgaagagtaatgcttcagcatcgccaggattaggatgatactcggtaaggtatttcttcaaatattgaacaggctttgccagaagaggtattgggcgtctctttcgtccttttcctatgacaattatgtgaggctttgcgcagtccatggtaatattgcaaatcttcagcgtcaaaagctcattgatgcgcacggcagtcgaatacagaagaagcagaagcgtgtaatcacgaaaaccaatggcggttctttggtttggcatggataaaagcgtgtcaacagccaacttgctgagcccgatcactttcctttttggagttttttcattcggcacattctccgcctgcaggaacactgaaacgaatgatatgtcattatctgataggtatttcagaaaagcgcgcaaggcggacaatctcacattgcaggttgccggactacagttacggacttttttcatccaaacaatccactcctcaatgtttttcttgcaaaagcaatcagcattcaacgtttcgggcgttatgccttttaccgttctgaggaactctgcataaagcgtcatggaaacatggtagtttcttagggtatgtcggctgcacgccttgatggaaggcacatggtgttcaagccagtcatgcaggcacgcggcaatctgcatggcctgtgggttaatcttctttttcataatcgtcttgcgttaattgttggctgatttcattgtcggtacacgccattatgtccgaaatcgccggagtcaaagagtagtaagccaatgtactttctatttgcctgtgccccatactcttgcttagagccagcaatttgtcatgtacggcaaatccttggtgtgtccagctgtttatgttctctatggcgtagttgtgccttagttcgtatgggattgcgcgggatgaattgcagctttgccacagcaccctgaagtggtacgttacccatacaggagggtgcggcttgtcatccggtgtcgggaaaaacaccctacggttcggaatcagcccatctatttttccgtcataagtacgcatcaggggcaacattgtgtcatggaggactacataatgctggtcataccctttgccacgtttgatggataccacgccattttcaaggtttacgtcatcgcgttccagcaggatggcctcggttgtccttattcctgaactgtacagtaaacggaagaacaccggcagtgtcatgcgctggatggccgcgagtctgccacgccttggctttatgttgtcgcaagcgtcaaagaagcgtttcaattcatagtgtgtaaaaggatgcggcgtataagtcctcggcacagaccttggcacttgcggcaagtcaattttcgtcattccacgcttgttcatgtacttgatgaagtctaagacaggatagacacgtgacacgcaggagtttgtgcattcagtcggacgttgcctgcaccatctgtccacgatttcttgggtaagctcagtttgtcccggatattcccttgcgcaaaaatgatcgaacagtattacgttcttgacatagctatggctgttacgcccggaagccttgcggtattttacatacccttctatagcgttggataggaatgaaatagttttcatacgtcaaacaccccctttcctacgggaaagtattctatgctcaatgaacattccttcagcctcttgaattccgcactaaggtagcggtcgagagaatccggggacgcatggccgagggtggcacttatgacaggttgctgcacaccgccctgcaacagggccgttgccacattgtggcggaacagatgcagactctttctctcattttcaccttgtcttattcctgctttgcacatgacttttgagcatatagcatcgagattgcttgtatgaagccttctgtatggcacctgtactgtgagaaaaacatatggttccgggcttcggggacgttctttgagcaggtaatcaaatacagcgtttcctaccacggcacggagtggcaatgtcaggggctgtcccgtctttgcctgagtgatttttatcaggtcgtgttcccaatcgaagctgtcaagcgtgagtgcagagatgtcacatccacgcaatcccgtgtacatggccaaggttatgatggctttgtcctgtagagatattgtgctatcgtgttctaaagtatgcctgatagcagtcagttcttgctccgtaaggtattgaatgtttttccgcatattgggtatggacggcaggtatgcgattatacgttcaacggatttgccatagtgaggcaaacaggatttcagcccatattccaccgaatatttgaacgaatggcccattttcggttttccgtctttggaaaacacttccaataccgcattttctgttattgattcgaatgagtacacccccatttcctgtagccggaagaagaacgaagatagcgcatacttcacatttattgaaaatttgcaacgtctatctaccatgttgaaagccatgtccgttacatccttgtattctgcgccgagcaactcatagtggtgaggcttgctgtagtgtttgcaaccatcgggtaataatccattctcaatatattggcagattacacgcaacaggcgtaccttgttcctgtaggtatacttgttggaccacaattcttttaatgtcggttcaacgtcggagaaactctgccatttataatggttagcattttccgatagccactcagccattttcttcacatagcctatgtacatggctgaataaccggtttcttgtaaataagaaacaagcccctcgactttttcattcagattaaatatgtccataatcgcatcttgtttaaaagttattctacaattatgacggaatataatcagaactgtttacagatcaaaacaaatgattactaaataattgagtgatttaataggaaactcataaaagttctgataatggcataaatccgaaattttggatttgagccaccagttcaaaaacttgacgttcaacacgcgccatgaccgtgtggcggggctgggaaacagcgagggaagccagaaggcacttaacatgctctttgccatacgcaccatacaggagcgcacaggaaaagacttgggtgcgaccttcctctccggcacgactatcagcaactcactgactgaattgtacctgctgttcaagtacctgcgcccgaaggagctggaacggcaggacataaggtgttttgacgcttgggcggcgatatttgccaagaagacgacggattttgaatttaacgtgacgaacaatgtggtccagaaggagcgtttccgctacttcatcaaagtgccggagcttgccgccttctataatgaaatcacggactaccgcacggcggaggatgtgggcgttgaccgccctgccaagaacgagatactgcaccacataccgccaacgccggaacaggaggacttcatacagaaactgatgcagttcgcaaagactggcgatgccaccctgttgggcagactgccgctttcggaaacggaggaaaaggcgaagatgcttatcgccacggactatgcccgcaagatggcactcgacatgcgtatgatagacccgaattatgaagaccaccccgacaacaaggcgagtcactgtgccaagatgattgcggagtattaccaaaaatacgacgcgcagaagggaacgcagttcgtattctctgatttggggacataccagccgggagacgggtggaacgtctattcggaaatcaagcgcaagttgacggaggactacggcataccgccaagcgaggtgcgcttcattcaggagtgcaagaccgacaaggctcggaaggcggtgatagacgccatgaatgccggaacggtgcgtgtgctgttcggctccacctccatgctcggaacgggtgtgaacgcacagaaacggtgtgtggctatccatcaccttgatacaccgtggcgaccgtccgacctgcaacagcgtgacggacgcggagttagagccggaaacgaaattgccaagcatttcgccgggaacaacgtggacgtaataatctacgcggtggagaagtcactggacagctacaagttcaacctcctgcattgcaagcagactttcatcagccagcttaaaagcggtgcgatgggtgcacgtaccatcgacgagggggctatggacgaaaaatcgggcatgaacttctcggagtacatggcgttgctatccggcaacaccgacctgctggacaaggcgaaactggaaaaacgtatcgcctcgctcgaaggggaacgcaagtctttcaacaagggcaggcgtgattcggagttcaagctggagtcaaagacagccgagttgcgtaacaacacggctgtcatagatgccatgacggaggactggaaccgcttcctttcggtggcgcagaccgacagggagggcaaccgccttaatataataaaggtggacggtgtggattccaccgatgagaaggttatcggaaagcgtttgcaggagatagcgaaaaacgccactacgggcgggctttacacacaggtcggagaactttacggttttccgataaaggtggtgagcgagaggatactcaaagagggattggagtttaccgacaaccgcttcgtggtagaggggaactacaagtacacctataacaacggacatctggcaatggctgacccgttggccgccgcccgcaatttcctcaacgctttggagcgcatcccctccatcatcgaccagtacaagactaagaatgaagtgctggaacgtgagataccgcagttgcaggagatagcgggcaaggtgtggaagaaggaggaagaactgaaacaattgaagtctgaacttgccgcacttgaccgaaaaatacaactggaacttgcgccgcccacgcccgaagtcgccgaaaaggagaacgaagggcaacaggtcaagccggaagcggaagatgtgcggaacaggcaggcgcaatattccgaaaatgcaccgccgcagatacgcaatccatcggaaagtattatccccaatcacaccataactgggcatccggggctgtatgccaaggaggaaacccggttcaaaggattgaaaatataaccttaggaattttatctgaagtattaataggggctatcccaaaaggtctaaaagtaaattttatcctctctgcaagtatctgtaggatggtaactgcattttttctttttgggcagcccttattaaaatttattcttattttaggttatatacattcatgtccatttatgtaaaaaattcctgctgaccttgtttatgtcttgtcagtcaccatttgcaaaaccatatttgaccctcaaagaggctgaatttgataagcaacttgctacatactcataaaaggagctaaatagaacacgaatgggaaatactcaaatgccaaactaaagaagatattggccaaaataaacgctataccgagagagaaacttgatttttcaacttcctaaaacggtgttgttcaaacatttctacttatttgtacttaccagttgaacctacgcttccctaataaaatgtctatggtaaaaagttaaaaaatcctcccacttttgttagatatatttttttgtgtaattttgcaatcgttatgcggcagtaataatatacatattaatacgagttagtaatcctgtagttctcacatgctacgaggaggtattaaaaggtgcgtttcgacaacgcatctaatgtagtatattattgcttaatccaaatgaatattataaatttaggaattcttgctcacattgatgcaggaaaaacttccgtaaccgagaatctgctgtttgccagtggagcaacggaaaagtgcggccgtgtggataatggtgacaccataacagactctatggatatagagaaacgtagaggaattactgtccgggcttctacgacatctattatctggaacggggtgaaatgcaatatcattgacactccgggacacatggattttattgcggaagtggagcggacattcaaaatgcttgatggagcagtcctcatcttatccgcaaaggaaggcatacaagcgcagacaaagttgctgttcaatactttacagaagctgcaaatcccgacaattatatttatcaataagattgaccgtgccggtgtgaatttggagcgtttgtatctggatataaaaacaaatctgtcgcaagatgtcctgtgtatgcaaactgttgtcgatggatcggtttatccagtttgctcccaaacatatataaaggaagaatacaaagaatttgtatgcgaccatgacgacaacatattggaacgatatttggcggatagcgaaattccaccgactgattattggaatacgataatcgctcttgtggcaaaagccaaagtctatccggtgctacatggatcagcaatgttcaatatcggcatcaatgagttgatggacgccatcacttcttttatacttcctccggcatcagtctcagacagactttcagcttatctctataagatagagcatgaccccaaaggacataaaagaagttttctaaaaataattgacggaagtctgagacttagagacgttgtaagaatcaacgattcggaaaaatccatcaagattaaaaatctgaaaactatttatcagggcagagagataaatgttgatgaagtgggtgccaatgatatcgcgattgtagaggatatggaagattttcgaatcggagattatttaggtgctgagccttgtttgattcaaggattatctcatcagcatcccgctctcaaatcctccgtccggccagacaagcccgaagagaggagcaaggttatatccgctctgaatacattgtggattgaagacccgtctttgtccttttccataaactcatatagcgatgaattggaaatctcgttatatggtttgacccaaaaggaaatcatacagacattgctggaagaacggttttccgtcaagatccattttgatgagatcaagactatctacaaagaacgacctgtaaaaaaggtcaataagattattcagatcgaagtgccacccaacccttattgggccacaatagggctgactcttgaacccttgccgttagggacagggttgcagatcgaaagtgacatctcctatggttatctgaaccattcttttcaaaatgccgtttttgaaggaatccgtatgtcttgccaatcaggattacatggatgggaagtgacagatctgaaagtgacttttactcaagccgaatattatagcccggtaagtacacctgctgatttcaggcagctgaccccttatgtcttcaggctggctttgcaacagtcaggtgtggacattctcgaaccgatgctatattttgagttgcagataccccaggaggcaagttccaaagctattacagatttgcaaaaaatgatgtctgagattgaagacatcagttgcaataatgagtggtgtcatattaaagggaaagttccattaaatacaagtaaagactatgcctcagaaataagttcatacactaagggcttaggcatttttatggttaagccatgcgggtatcaaataacaaaaggcggttattctgataatatccgcatgaacgaaaacgataaacttttattcatgtttcaaaaaacaatgtcatcaaaataatggagcggtcaggaaatttctataaggcaatacggttgggatatatacttatctccattcttatcggatgtatggcatataatagcctctatgaatggcaggagatagaagcattagaacttggcaataaaaaaatagacgagctccgaaaagaaataaacaatatcaatattcaaatgataaaattttctctattgggtgaaacgatactggaatggaacgataaagatatcgagcattaccatgcacggcgtatggcaatggacagtatgctctgccgtttcaaggtcacctatccagcagagcgcatcgatagtgtgcgcagtcttttagaggataaggaacgacagatgttccagatagtccggttaatggatgaacaacaatctattaacaagaagatagccaatcaaattccggttattgtgcagaaaagtgtgcaggaacagtccaaaaagccaaaacgaaaaggtttcttgagcatcttcggcaaaaaagagggaacgaagccaacgacaacaacgactacgctccgttcatccaatagaaacatggtcaacgaacagaaagcgcagagccgtcgattgtcagaacaagccgatagtcttgctgcccgtaatgcagaacttaacagacaactgcaaggattgatttgccaaatcgaaaagaaggtacaatctgatttacaaaatagagaaagcgagataacagccatgcgtaaaaaatcatttatgcagataggcggcttgatgggatttgttcttttgctgttggtcatttcctatatcatcatacaccgtgatgcaaagaacattaaacgatacaaacgcaagacaacggatttgatcgagcaattggaacagtccatgcaacaaaatgaggtactcataacctcccgaaagaaagcggtacatactattacccatgagttgcgtacaccactgacggcaataaccggctataccgaacttttgcggaaagaatgcaatagcggtaataatgggcaatatatccaaaatatactgcaatcctccgaccgtatgcgggatatgctcaacactttgcttgacttcttccgcctggacaacggcaaggaacagccccgtctgtcaccctgccggatttctgcaatcacgcacacacttgaaacggagttcatgcctgttgccgtgaacaaagggctgtccttgtccgtgaagactggacacgatgccattgtattgaccgacaaagagcgaataatacaaatcgggaataacctgctgtcaaacgctgtcaagttcacagaagaaggcggtgtttctttgattactgaatatgataatggagttctgacactggtcgttgaagatacaggtacaggcatgacagaagaggaacagaaacaagcgttcggtgcgtttgaacgtctatcaaatgccgccgcaaaggagggtttcgggcttgggcttgccataatgcgtaatattgtgtcgatgcttggcggaacaatccgtttggacagcaagaaagggaaaggcagtcgtttcacagttgaaatttctatgcaggaagctgaagaacagcttggatatacaagcgatacacctgtttatcataacaataaattccatgatgttgtcgctattgacaatgatgaggtattacttctgatgctgaaagagatgtattcccaagaaggaatacactgcgacacttgcaccgatgctgcggcactgatggaaatgatacgccagaaagaatacagcctgttgctgacagacttgaatatgcccggtataaacggtttcgaattgctggaactgttgcgttcgtccaacgtgggcaattcaccaacaatcccggtggttgtggcaaccgcttcgggcagttgtaacaaaggggaactattggcaaaaggctttgccggatgcctgttcaagccgttctccatatcggaactgatggaagtttccgacaaatgtgccataaaagcgacaccggacggagaacctgatttttcagccttgctgtcttacggcaatgaagccgtcatgctggataagttgatgacggaaactgaaaaagagatgcaggcggtacaggatgcggcaatagagaaagacctgcaaaagctggattctcttacacaccacctgcgcagctcgtgggaagtactacgtgccgaccaaccgctaagggaactttacggattgcttcatggcgatacactcccggatggtgaagcgttaagccgtgctgtgactgccgtgttggaaaaaggagcggaaataatccggttggcagaaaaggaaaggagaaaatacgaagatggataagacaaaaataattgtggtggaagacaacattgtgtattgcgaatatgtctgcaatatgctgtcacgggagggctaccacactatgaaggcttaccatctctcaaccgcgaagaaacatctgcaacaggcaacggataatgacatcgtggttgccgacctgcgtctgcctgacggtaacggtatagaccttttgcgctggatgcgaaaggagggaaagatgcaacccttcattatcatgaccgactatgccgaagtgcataccgcagtggaaagcatgaagctcggttcgatagactatatccccaaacagcttgtggaggataaactggtccctcttctccgttccatacagaaagaacgacaggcgggacaacgccgtatgcccgtgtttgcccgtgaaggttccgcctttcagaaaatcatgcaccgtataaggctggtagccgctaccgatatgagcgtgatgatattcggagagaacggaacaggtaaagaacatattgcccaccacctgcacgacaaaagtaaacgggcaggcaagccattcgtggcggtggactgcggttcactcactaaagagcttgcaccatcagctttcttcggacacgtcaagggcgcgttcacgggtgcggatagtaccaagaaagggtatttctatgaagcggaaggcggcacgctgtttctggacgaggtgggcaaccttgcgttagaaacccaacagatgttactccgtgccatacaagagaggcggtatcgcccgatcggtgacaaatcggacagaagtttcaatgttcgcatcatcgccgccaccaatgaggatctggaggcggcagtgagtgaaaagcgtttccggcaggatctgttttaccgtctgcatgacttcgggataaccgttccgcccttgcgtgactgtcaggaggacatcttgccgttggcggagttcttccgcgagatagccaacaaggaattggaatgcaatgtgagcggtttcagttccgaagcacgtaaagcgttgctgacacacgcatggccgggcaacgtgcgggaacttcggcaaaagataatgggagctgtattgcaagcgcaggaaggtgtggcgacgaaagaacatctggagcttgccgtaatcaaacctacctcacacgtcagtttcgccctgcgcaatgacgtggaggataaggaacggatattacgggcgttgaaacaggcaaacggcaaccggagtgtcgccgcagaactgctcggaataggcagaacaacactatacagcaaacttgaagagtatggacttaaatataaattcaagcaatcatagcccgtaattcactgaatttggctatctttgcataacatttgagaaaaacggcgattggcaggagctttttgccgccaacatataggataagaccgcaaggcgtttcaagcgaaaatctggtaaattggaactacggagacgattgcgtgatgcttatgctatgcttatgcatagcgtgcattcacgtactctccgtaaaggctttaccagagccatcgcttgaaggtagtgtgaattgcacgctactttttttacccttgcctaacgaaaggaaacgattatgggtaaagttcagattctcgccgtactgacgatggacggatgtctttcttcagagttatatgataaagcacatcaggatttgtgccttgaccgttgcggtcttgatgaaatcagggagaaagccctttaccatgtcacaccggactagattacaaacaatttaagtcggagataatttgtccttgtgaaaaaatattgaattttatgcctttgaaatccagcaccttgtaaaattgagtgttggatttaatattttctgccgcgctttttgccaattatatttatgtgcgcacgcagaaaacaaagtgtaattttcaaaattgacagaaccatgaattatttcttgttggcggaaaccgactttttccgcctgataaacgaagccggcgactgcaatatggaaacggcatacacggctttcgccacccaagtgatcgaactgtgcaacggcggcatggacatgaaccttaccgtcatcgcgcttgcctacatcgaaatcgagttgcagcaccatcccgtgcgtaatctgtcagaagaaaaaagagagattgccgcctacgtcagcaaggctctgtctttcgtaagaaagatgcagaaattccttgccacgccccaagtgccaccactaatatccgccaataacgcaacagaaaccaccgccagcctcctgcaatggacgggcaatgccatcgacctcgtggaacttatctacggcatcgacgagatgggctgcatcaacaacggcaacatgccgctcaaacagcttgccccgctcctttacaagatattcggggttgagtcgaaggactgctaccgtttctacaccgacatcaaacgccggaagaacgaaagccgcacctacttccttgacagaatgcaggagaaattgaacgagaggatgctgcgcgatgatgagttggatcgtatgaggagataaaaaacaaattcattagaataaatcacatcaattcaattcattattttgttatattagaaaaagatattaactttgcattgaaattgatatagtcataattcagatgaactcaatacacgatataacagactacattatcttacgagtaaaatcggaagatagatttgcgtctttaataaatttaaagttgcagaagttattgtattatgttcaagcatggtcttatggtatcaataaaaaacctatgtttgacggcgagtttgaagcatggattcatggtccggtaaatcgagaaatctacaatcgatttaattctacaaaatatctctattcagaaatcaatattgatgattgcatgaatcacaatgtgagtttatcatcagaagacgctgaatttattgactttatattggagaattatcttaaatatagcggtgctgaattagaacgattgtcccacaatgagatgccttggattgaaacacgtggagatttaaatgtaaatgagcgttgtgacaaggttattactccagaactaatgattgagtattatgggaaaaaatgggaaactattaaatcttaattcagattctcctaaatacggaaacaaatcattagttaccaaagaacaagaaaatgagttaaagagaaggaagataactttttccttctcttactttaagcagatacctaattttcagattggagagtgttctaagggatggcatattgggcttcttgaacgattaggtgctttgggtactatgacaccgcaagaagtattagaagaaaatagaggtagtattgcattaagatgtcatccaatagattggagtgctaaaaacattcctattcaacgaaaagatttagattggctaccaaaagaaatattggacaatgagacagattttccaataatgcaattttcgataacaaaaagtacggggcgtattgtaggttattttgatcgggattcttctatatttcacatagtattattagatcctgaacataatatacaaccggcaaagaaaactaattatcaaatacaaccaactacaaaagggttatctcaatatgatgatttattaaataagttggaacgaattaaaagtatcgtatcagattgttctgataaaaagtgcaaattgcattcacatattagtgttatagaagaattacatgacaatattgtttatataggacttgataatgacttctatagcacttatcaagaaatcttaaagaaaattccattgcaaaaaattttggaaaacggaatcttagtaagtatggataatgcttaagttctaaaaaaatgaagaaaggtttatggtaagcctttcttcatttttttatttacttctgctgcaacaaatgcttcaggttgtcatcgcctgcgatgcgctccagttcatcctgcacaatctgcttcacctcttccttgatgcgccggtagttcgcctgcaccgtttccttcatgtggtcgttgccgtcctcgtccgtgaaatcggtaatgacaggaattttcttgtaggcactttcctcccgtttgaccttttcggcatccaccacaatctcgcagtggaaaatcttctgctcgatgcgctcgttgaagttgtcggacacagaaccgacaaacataccctgcgtaagaccggaaatcttgctcggcgggatgagcgcgtccatctgcgtgttgatggaggtggacacgtcctgccggttgatggagatggactgccgtttctgcaacaccttaccgaaccgttccgatagtgtctttgccgtttcgcctaccacctgcccggaaaagatattgccgacagtgttcatcaccaccttcgcctccttgtccccgtagtctcgcaccaactggctgaaatcctgaaaacccagacacacggcaaccttgttgcttcgggcggtagctataagattgtccagccctttgaagtatatcgtgggcagctcgtcaatgatgaccgacgacttcagcatccccttcttgttgatgagtttcacgatgcgggagttgtacaatccgagtgccgccccgtagatgttctggcggtcgggattgttgcccacgcataggattttcggctcttcgggattgttgatgtccagcgtaaactcgctgtccgacatcacccaatagagctgcggtgaaatcatccttgaaagcggaattttcgccgacgctatctgccccatgagctgctccgcagcccctccgagccaagcgtccatgaatggtgaaaggtagttctccagctccgggtaagaggtcagtatcggaaatatatcctcgtaacggcggttcagaaactcgatggcatgaggaaaagtgcaatacttcccgttctgatagattttgagataccagataatgctggcaaacagaatgataggagactccacgaagaagtcgccctgcttttgcacccacgttttattgaggttgagcattatcgtgtaggcactctcgtaagcgtccgtaatatcctccatgaaatccgggtgaatgggattgcaacggtgtgaacggcgcgggtcgtcgaagttgattacatagaatttcggtttcaccttgtagccctccgggtggttcagcaaatggttataggcaatagtggacaagtcgctgaatttgaagtcatatacatacatcgaaaatcccttttcaatctgttgcttgataaaattgtttacaacggcgtatgacttgccgctgcccggcgtacccaacacgatggacgcacggaagggattaaccacattgatccagccgttgttccagcgtttcctgtaatagaaacgtgtcggcagattgaccgaatactcgctttcgataagcctcgtttcctgcatgaaactctcgttctcgttgttgaaaacatcctccatcaaattgtgtttcaacagacggctcatccacagacctcccatcagcaggcagacatagcccgttccaatggtaaggacatatagtcccgtcaccgcttcaagcggcagcggcaggggcagcaaccaccagttcaggaaaaacagcacgaacccgacggcaaatgctgtccagattctcccccaagtgattttctcacccttgacacctttcgtacccagacaggacagggcaagcaaaaggacggaaaacagtttcgtgtacagtatggaatggaacaaccccgccgtgcggtcgaagttcagaaggattttgtccaccacgccgatgttcacgccccacatcctgatggcttcgtagcagaaccagtacacgttcatgaccactaaaatgatactcacggcacgcagaaaatccatgattttcgccaatgccctcaaatcgtcttcttgtgacatacattgattttttaattgttgatactctgattacatacccaagcccttgcgctttttcttctttttgcgcttcattgcccggatgaaagcctcttcctcggcatcggtcgccggaccttcgggagtgagcaagcccataccgcccgacatgtcttcacggtcgtatgcggtctgcccatataccttgtccgcaacatccgccgggatggaaagcggtataggcggttgtccggcgtatggcagtgtgaagtgttcctgcaaggcattcgccgaaagttccttacccatgcgcgaaccgttcagcacgcatcccgtgcggtggtcgatgaaggtagccccatagatgcgcccttcctctgtgtagcgcagcacggtatctatgcccttctctttgagccgggaaataaacctgtccttgtcataagtgccttgcagcacggaaaggacggtgcgtttcgtcatgtctgccagtttcctgtccttgatttccgatttggaacggacaaacttcttctgcacggcttcatagcctgcggacttcccgaagagcgaggacttgaacggattgccaactttgttacccctgtcgtccgtgacggaatagaccagcccgtgatactcccgtccgcgcacgtttcccctcgcttcctccaccgtcatattatataaggaaaggagcgcacggtattcgcccatcgtctggaagcggtactgcccgttcagagccttcacggtgttgcccacctgctttttcacatcgccagccgatgcatccaccttgcgcaacgggttatccaatccctgattttttcgttctgccggatgcaatccatacttctgttccagttccctgcgaatacggtcgctgcggcggtagagaaaatcccggttgagccttttaccgttctcgtccacgttgaccgtcacgatgtgcaggtggtggcggtcgatgtcctcgtgcttgaatacaagataaggctggtttccgaaaccgagtttttccagatactcgcgggcgatattctgcaactcaatatcggtcagcacatcctccgggtgcgggttgagtgagatatgcaccaccggcttctcgaccttcatctgcggtggcaggaaggtgtggaaaccctccatcgccttgcttatgtccaccgttcccgaaccgtcattgtagatgcggttggtggtgagaagccgcccctgcgcctcgttaatcttctccccgttgtaggcaatcgcgccgtacaacgagtttcctacactgatttttgcgaccattttgcttccatttctctcgacaattccacaatctgacggctcagtttcacgagttcgacggtgtgttgctccagcttgtagagcaacgccatcgcctttttctcggaaaaatgcagcctcaattccttcacgacttggttgtaattcgtacccacggcgcggaactgcgcgtgaaaatccgacagcttggtgtagtagtccaccagcgtcttgtccaccttcagcaccttgaacggttgcccgaagaagtgcgctttgaggaaaaccgaccgtgcatagacacccgattttccgaacatggcgaggaaacggttgtgttcctcctcgttgaaacggacggtgtaccggtacaccgccggatcaagtttgggatttctccctgctttgcttttccttttctctttcatatcactttggatttagcggattgacggcataagccgccgcttctgttcacggcaccgcagttctgaaaggctttccgacttcggagggaaagcccgtcccctgcaagggcaagtgcttttccgggatgctcaaatcattttgagcggctgaaaagacatcttgctatgttcaggtgaacataaaaatccgtcaggggacggattgggaaaatacctttcaggactccggcccgcacgccatcggcgaaccctgccgtccgggtgcaaagttacgcccttaaagcggtaatggacagatgcttgacccggtcaatggctgccaaccggcgcaacatgccgccacttgctggagaagtgatacaggttcaaaaatatacttgtttatttgcagcatgattcaagaaacgaacggtttgaagatatgaggaaaggaacattcaaatacccggacaaccgcttcggcggacacttgccgaaacggatacccgaaccgtcggaaacccggttgtccgacaatccgatgacgtatggattcaatgacttcatgacgcaatgtcgtcattcatcacttgtccgccgcaccgcttcaccgcagaaccggatacgtggtgacccgcccgtgtgcctgttcacggaaacggataatgcggtaattcaatccgcatgtaaacagaaaataaaatcatcaacaattaaactgaatagaaccatgagtaaagaaatcttcgttgcattcgcaacacagaaaggtggcattggcaaatccaccgtcacggcactcgccgccagctacctccacaacgtgaagggctacaatgtcgccgtcgttgactgcgatgatccgcagcacagcatccacggtctgcgcgaacatgagacggcactcatcggcgggagcatctacttcaaggctctcgcgtgcgaccatttccgcaagataaagaagaacgcctatccggtcatcaagagcaacgcggtgaacgccctcgacgatgcggaaaggatgatcgccgccgaggtcatgaagcccgacgtggttttcttcgacatgccgggaacactccggagcaacggcgtgataaagacgctatcgcagatggactacatcttcacgccccttagtgccgatcgcttcgtcgtggagagtaccctgaaattcgtcacgatgttccgcgacaggctgatgacgaccgggcaggcgaaaacaaaggggctttatctgttctggacgatggtggacggcagggagaggaacgacctgtacggcatctacgaagaagtgatagccgaaatgggctttccggtgctttccacccgcctgcccgacagcaagaagttccgccgcgacctatcggaagagcgcaggagcgttttccgctccactatcttcccgatggacacggcactgctgaaaggaagcggcatccgtgagttttccgaagagataagcgacatcatcagaccgcagtgagcatgggcagcaggaaagtgaacacggaaggcatcgacgaggaactgctgttggcatccattgggcggcgcactcaggacgggacactgcgtccggcgcaggaagtccccgcaaccgcaccgaccgaagatgacaccgccgtaccggagccgccacccgcgcagcccgtggcacgggagagaacgcagagggaaggcggtcgccggaaaaggcaggacgaggactataacgagctgttcctgcgccgcaacgagataaagacccgccagtgcgtctatatcagccgcgacgtacacggcaaaatcctcagaatagtgaacgatatcgccggaggggaaatctccgtgggcggctatgtggataccgtgctgcgccagcatctggaacagcacaaggagagaatcaacgaactgtacaagaaacaacgtgaagatctgatttgaaaatggaaaaagaaatgacaccgaatgaaaaaagaccgcagcaggactgcggaggcatgcttgcccaagtgaaggcgagcgtggaaatactgtcgctcgtcccggtaagcggcaaatgcagcgagaaggactatgagcgtctgtttatccgcgaccccgaagtaaaggcgcgggagggcaagatggcgtatgtgcgcccggagtaccacgagcgtatcatgcgcatcacccgtgtaatcgggcatgaccggcttacgctgtccgcctacatcgaccatgtgctgacgcaccacttcaaccagtgcgaggacgccataaagagcctttacgcccggaattacaattcagtattctaattaaaaccggaagtatatgaatgaaacaatcagtatgacagacattctgctggcggtatcggtcggctgcaacctatggttcctgttcctgctcctttacgagcgcatcatggaaacgcggcttgtccgcttcttcaagggcatagccggattatggcggtcgttggacaggaatggaccaaagagcgtagcggcacatgaggaagttcccacggcaaagggggacatcatcggcaagagccgtttcaaaatggcatccacccggacaaccgctgccataccggcgcaagaagccgccacttcggaaaaaggcattgagctgtcggaggaagaggctacttttgacgacggaaacacggaaaccgcgtcccgcccggcgcaagtcccggaggaaaagctcgatgagaccttcacgagcataccgccggaggaactgggatacggggaggacgaaccggatgaagacgcttcggacacgccacgggcttcgggcagcagctttgacgagatcgacgacgcctgcaagaccgccaagaacccggatgcaacgcaggcgcaacgtgaaaaggcggccaaggtgttcaccgacatggagggcacggagttgtacgagaaaatgatggaaggctcttcggagataggcatccgcatcaaggggcttatcgagattcggctgaagaaatctgaaaaggagttcgtcgtgccggacaacatcgaggagttcgacattcgcaactatgtatgacaacaataaaagaaatgaacatgaaagaatgacatcaacccacgcggcgaggaaacgcaaggcgcatccccatccgcaacggacacgcccacgtccgtggaaacaaacgggcatccactaaaaccaaagtaaagaaacaaagtatcaaccgcccgacaaaggaccatccacccttttgacggcaaaaaacaagaacagtttatgaacaagaacatcttgaaaaacagaaaagcaatcctctccgcggcacttgtcatcgccgcaaccgcctctgctttcgcacagggaaacggcatcgcgggcatcaacgaagccacctctatggtgagttcttatttcgaccccggaactaaactgatatacgccatcggtgcggtcgtcgggcttatcgggggcgtaaaagtgtacggcaagttttcatcgggcgaccccgacaccagcaagacagccgcctcgtggttcggcgcgtgcatcttcctgattgttgccgccaccatcctgcgctcattcttcctttaataaataatgtatggctgaatacccaatcaacaagggtatcggccgtccggtagagttcaagggcttgaaggcacagtacctcttcatcttctgcggaggtctgctggctctcttcgtcctgttcgtcatcctctacatggtcggcatcgaccagtgggtatgtatcggctttggcgcggcatcgtcctccctccttgtatggcagaccttcgcgctgaacgcccggtacggcgaacacgggctgatgaaactgggagcggcacggagccatccccgatacctgatcaaccggcggcggataacccgtctgttcaaacgacaacgaaaggaagaaacgacatgaggaatacatcaaaaatgacaacactggaaaacaagttcccgcttcttgcggtggagcatggctgcatcatctcaaaggacgccgacatcacggtggctttcgaggtggagctgccggagctttacaccgtgacgggcgcggagtacgaggcgatacacggctgctggtgcaaggcgatcaaggtgctgccggactactccgtcgtccacaaacaggactggttcatcaaggaacgctacaagccggagcttcagaaggacgacatgagcttcctctcacgaagcttcgagcgtcacttcaacgagcgtccgtacctgaaacacacctgttatctttacctgaccaagacgacaaaggagcgtaaccggatgcagagcaacttcagcacgctgtgccggggacatatcatcccgaaggagctggacagggaaaccacgaccaagttcatggaagcctgcgaacagttcgagcgtatcatgaacgacagcgggcttgtcaggttgcgccgcctctccaccgacgagattgtggggacggagggtaaggcggggctggtagaacgctacttctcgctcatgccggaaggtgacatcaccttgcaggacatcgaactttcggcaagggagatgcgcatcggcgacaaccgcctgtgcctgcacaccctctccgatgcggaagacctgccgggcaaggtggcgacagatacccgttacgagaagctctccactgaccggagtgactgccgactgtcattcgcctccccggtggggcttctgctctcctgcaaccatatctacaaccagtatgtgctgatagacaacagcgaggaagccttgcagaagttcgagaagtccgcccgtaatatgcagtcactatctcgctattcaaggagcaacagcatcaaccgcgagtggatagaccagtacctgaacgaagcccattcctacggactgacctcggtacgggcacacttcaacgtcatggcgtggagcgacgatgcggaggaactgaagcatatcaggaacgacgtgggcagccagttggcaagcatggaatgcgtgccgcgccacaacaccatcgactgcccgacactctactgggcggcgatacccggcaatgcggcggacttcccggcggaagagagtttccacactttcatcgaacaggcggtgtgcctgttcacagaggaaaccaactaccgctcttcgctctcgcccttcggcatcaagatggtggacaggctcacggggaaaccgctgcacctcgacatcagcgaccttccgatgaagcggggcatcaccacgaaccgcaacaagttcgtgctgggtccttcgggcagcggcaagtcgttcttcatgaaccacttggtgcggcaatattatgagcaaggcgcgcatgtggtgctggtggacacgggaaactcctatcagggcttgtgcggcatgatccggcgcaagacagacggggcggacggcgtgtatttcacctacacggaagagaagcccatatcgttcaacccgttctacaccgatgactacatcttcgacgtagagaagaaggacagcatcaagaccctgcttcttacgctctggaaatcggaggacgacaaggtgacgaagacggagagcggcgaactgggcagtgccgtgagtgcctatattgagcgtatccaatctgaccgtagcatcgtgccgtcgttcaacaccttctacgagtatatgcgtgacgactaccgcaaggaactggctgagcgtgacatcaaggtggagaagtccgacttcaacatcgacaacatgctcaccaccatgcggcagtattaccggggcggacgctacgacttcctgctcaactccacggagaacatcgacctgctcggcaagcggttcattgtcttcgagatagattcgattaaggaaaaccgcgaactgttccccgtcgtgaccatcatcatcatggaagccttcatcaacaagatgcggcgtctgaaaggggtacggaaacaacttattgtggaagaggcttggaaggctctctcttcagcgaacatggctgaatacctgcgctatatgtacaagaccgtcagaaagtattacggcgaggcaatcgtggtgacgcaggaggtggacgacatcatttcctctcccgtggtcaaggagagcatcatcaacaactcggattgtaaaatcctgcttgaccaaaggaaatatatgaacaagttcgaccaaatacaggcgttgctcggactgacggaaaaggagaagggacagatactctccatcaacatggcgaacaatccttcacggctctacaaggaggtgtggataggcttgggtggcacacaatcggcggtctatgccaccgaggtcagtgcagaagagtatctggcgtacaccaccgaggaaacggagaaagtggaggtttaccgtctggcggagaagttgggcggcgacatcgaagccgccatccggcaacttgccgagaagcggagaaacaaggaaacaaccaacaattaaaaatgaatttatcaacgaaaaaagaaaaatgcgtatgagtttacagaaagtgaaaatgctgcaagtcagcaagtgtctgatcggattggcggtcatgatgctgcaatcctgcgacgtggccgacaacctccgtgatatgctgtgcgggaactgggagagcgtggaggggaagcccgacgtgcttatctacaaggagggcgaagcctacaaggtgacggtgttccgccggagcggtctgcgccgcaagctgaaaccggaaacctatctcttgcaggaggagaacggcaacctgttcatgaacaccggcttccgcatcgacgtgtcctacaacgaggccacggacgtgctgaccttctcgccgggcggcgactatgtgcgggtgaaaccgcagccgggacacccgacagaagaataacaaccactaaaatccaaagtaacatgagaacaagaataacaatgattatctgcctgtgcctgcttttcgcaggcagggcaagcgcacagtgggtcgtaagcgatccgggcaatctggcgcagggtatcatcaatgcctccaaaaacatcatccatacctccaagaccgccacgaacatggtgagcaactttcaggaaacggtgaaaatctatcagcagggcaaaaagtattacgatgccctcaaatcggtgaacaatctcgtcaaggacgcccgcaaggtgcagcagaccatcctgatggtaggcgacatcaccgacatttatgtaaacagtttccaaaggatgctccgtgatggaaatttcagaccagaagagctgtcggcaatcgctttcggttacacgaaactgctggaagagagcaacgaagtgttgacggaactgaagaatgtggtgaacatcaccacgctctccatgaccgacaaggagcgcatggacgtggtggaacgctgctactccaaaatgaagcgttaccgcaaccttgtgagctattacaccaacaagaacatctccgtgagttatctgcgtgcgaagaaaaagaacgacctcgaccgcatcatggggctgtacgggaacatgaacgaaagatactggtaagcctatggagttcgataaccttcatcagattttacgctcactttatgagcagatgatgccgctatgtggggacatggcgggtgtggcgaaaggcatcgccgggctgggtgcgctgttctacgtcgcctaccgggtatggcagtcgctggcgagagccgaaccgatagacgtattcccgatgctccgcccttttgccatcggtctgtgcatcatgttcttcccgactgtggtgctgggcacgataaacagcatcctctcacccgtcgtacagggcacggcaaagatgctggaggcggaaacgctggacatgaaccgataccgggagcagaaggacaagctggaatacgaggcgatggtacgcaaccccgaaaccgcctacctcgtgtccaacgaggaatttgacaagcaactggaggaactcggctggtcgccctccgacatggtgacgatggcgggaatgtatatcgaccggggaatgtacaacatgaagaagagcatccgcgacttcttccgcgagatactggaactgctgttccaagccgccgccctcgtgatagacaccgtccgcaccttcttcctcgtggtgctggcgatactcggtccgatagccttcgccatatcggtgtgggacggtttccaaagcacgctcacgcagtggatatgccgctacatacaggtatatctgtggctgccggtgtcggacatgttcagcaccatactggcgaagatacaggtgctgatgctgcaaagcgacatcgagcggatgcagacagacccgaacttctcgctggattcgagcgacggggtgtacatcgtgttcctctgcatcggcatcatcggctacttcaccattcccaccgttgccggctggattatccaagccggaggcatgggcggttacggtcgcaacgtgaaccagatggcgggacgtgccggaggaatggcgggcagtgttgccggagctgcgacaggcaatatgatgggacgtgccggcaaattgctgaaataacaatcatgtagaatcattgaaacagaattaagaatggaatttaagtcactcagaaacatcgaatcatcgttcaggcagatacgcctgttcggtatcgtcttcctttcgctgtgcgccgtggtgacggtatggagcgtgtggagttcctaccgtttcgcggagaagcaacgggagaaaatctatgtgctggacaacggcaagagcctgatgctcgccttgtcgcaggacttgtcgcagaaccgcccggcggaggcgcgggagcatgtgcgccgcttccacgagctgttcttcacgctgtcgcccgaaaagagcgcaattgaacacaacgtgaaacgtgccttgctgctggcggacaagagcgtgtaccactattattcggacttcgccgagaaggggtactacaaccgcatcatcgccgggaacatcaaccaagtgctgaaggtggacagcgtggtgtgcgacttcaacgcctatccctaccgtgccgtgacctacgccacgcagaaaatcatccggcagagcaacgtcaccgagcgcagcctcgtgaccacctgccgcctgctgaacgcatcgcggtcggacgacaaccccaatggcttcaccatcgagggcttcaccatcattgagaacaaggatttacagacaatcaaacggtaacggattatgaaacggaaagtaaaaagtatcagaaaaacaatgtggggcgtgtactggaagctccacgacaaacggaaacagctggtggcaaggctcaaagggtatctggacggcttgccgccggaaacacgccgccgcatcgtgctggggatgctcgccgccttcacggtgcttgccctctacaccttcggcagagccatctatgacatcggcagaaacgatggctcacgcatggaaacgggacacgccggacgggtggaactgccgaccccggcggaaacagacaatcacttaacaccttatttatatggaacagacgaagaatgaaccgatgaaagagaacaaaaccgctcccgacacgggaaagccgaaaaaggagcgcgaaccgctgacagaggcgcaacggctgaaacggcagaagatgatcgtgttgcccgctatggtgctggtgttcatcggggcgatgtggctgatattcgccccgtcctccggcaaggagcaacagccgggaacggacggatacaacaccgagatgcccgacgctgacaaggcgaacaagcagattatcggcgacaaactgaaagcctacgagcatggggagatggaggagcgtctggagagccgcaaccgtgccatcgggcagctgggcgacatgttcgaccgcgagatagctggaacggaggacgggacggacttcgacctcgccaatccgggcggcaaggaggaaaaggcacagcctgccacaccgcagactatccaatcctccgctgccgcctaccgtgacctgaacgccaccctcggcaacttctacgaacagccgaagaacgacaatgccgagatggatgagctgttggagcgcatcgcctcgctggaatcggaactggaaagcgaaaaaggcaggacttcatctatggacgaacaggtggcacttatggagaagtcctatgagctggcggcaaagtacatgggcggtcagaacggaggaaagccggaacaggcggcagagccttccaccgtgcagaagggaaagaagaacacggcgacacccgtaaggcaagtgacccgccaaatcgtttcctcccttgcacagcccatgagcaacgcggagtttgtcgccaccttctcgcaggaacgcaaccgggggttcaacacggctgtcggcactacagaggtatcggaccggaacaccataccggcgtgtgtgcatggtgcgcatggtgtgatggacggacagacggtaaggttgcgcctgctggagcctatggcggtggcgggcaggattatcccacgcaatgcagtggtggtcggcacgggcaagatacagggtgagcggctcgacatcgaggtcacctcgctggaatacgatggcacgattatcccggtggagcttgcggtctatgacacggacggacagcccggtatcttcatcccaaactcgatggagatgaacgccgtcagggaggttgccgccaacatgggcggctcattggggagcagcatcaacatctccaccaatgccggggcacagctcgcctccgatttgggcaaggggctgatacaaggcacgagccagtacatcgccaagaagatgcgcaccgtcaaggtgcatctgaaagccgggtacagggtcatgctctatcaggaaaaggactgaaaacaacaatcaataaaaaccatttaccactaaaaaaccaaaagtaatgagaaaagtaatcatcatgtttgccctcgctatgggcatcgcaactgccaacgcgcaggagaatgtaaccgttgaacagaacaacggaagtaatgaacagccgaccttgacgaaggaggtctatccgcagaaggaggcggacggcgacctgtatcacgggctgtcgcgcaagctggccttcgaccgcatgataccgccgcacggtctggaagtgacctacgacaagaccgtccacgtcatttttccggcggaggtgcgctatgtcgatttaggctcgcccgacctgattgccgggaaagccgacggagcggagaacgtcatccgtgtgaaggctacggtacggaatttccccaacgaaacgaatatgtccgtcatcacggaagacggcagtttctacaccttcaacgtgaagtacgccgccgaaccgctgttgctcaacgtggagatgtgcgacttcatccatgacggcagcacggtgaaccgcccgaacaacgcgcaggaaatctatctgaaagagctgggcagcgaaagcccgatgctggtgcgccttatcatgaagtccatccacaagcagaacaagcgcgaggtgaagcatatcggctgcaagcgtttcggcatccaataccagttgaaaggcatctacacgcacaacggcttgctctatttccacacggagataaagaaccagagcaacgtgcctttcgatgtggactacatcacttggaaaatcgtggacaagaagatggcaaagcgtactgccgtgcaggagcagattattctgccgctccgtgcgcagaactacgccacactcgtgccgggcaaaaagagcgagcgcacagtcttcacgatggcgaagttcaccatccccgatgacaagtgcctcgtggtggaattaaacgagaagaacggcggccgtcaccagtccttcgtgattgagaacgaggatttggtacgcgcgggtaccatcaatgaacttcaagtgcgctgaccatgagaaagtacatcgcaataatcatcgcgtcgcttgccctttttacggggcaggcgcacgcccagcggtgtctgccgaagatgcagggcatcgaggtgagggcggacatggcggacggcttcaatcccggcggcaagggtggcgggtacagtttcggggcggcactctccacttacacgaaaaaggggaacaagtgggtgttcggtggcgaatacctcctgaagaacaacctctataaggacaccaagatacccgtggcgcagttcacggcggagggcggctattacttcaagatactgtcggacgcccgaaaaatcgtgttcgtctatgccggggcttcggctctcgccggatatgagtctgtgaattgggggaagaaagtgctgcatgacggctccacgctgcacgaccgggacgcctttatctacggcggtgcgctgacgctcgatgtggagtgctacgtggcagaccgtatcgccctacttgccaatctgcgtgagcgttgcctgtggggtggcgacacacggaagttccacacgcagttcggggtcggcatcaagttcatcatcaactgacacgggcatggaacggacggaaatagatgctgtcagacagatgccgcttgcggacttcctcgcacggttggggtatgagcctgtcagaagtagcggtaacgagctgtggtatatcgccccgtacaggggcgagcgcacaccctctttccgtgtgaacgtggcgaaacagctctggtacgacttcggtttgggcaagggcggcgacatcttcacgcttgccggggagtttctgcaaagcgatgacttcatgaagcaagcgaagttcatagcggaagccgccaatatgacggttgccggatgggaaaagcccgtctatctctcgaagccgaccgaatccgtttttgaggatgtggaggtcgctccgctgctccgctcactgctgacggagtatttagaggaacggggcatcccttacgccatcgcatcccgtcactgctgccgcttgaactacggtgtgcgtgggaaacggtattttgccgttggctttccgaacatggcgggtggctatgaagtcagaagccgatatttcaagggttgcatacctccgaagtctgtatcactggtaaaggcgaatgacatcccggctgacgagtacctcgtgttcgagggcttcatggactttctctccgctgtgacgcttggcgtaaccggtaacgctgactgtcttgtgctgaactctgtcgccaacgtggagaaggcgacggggatgctggagggctacgggcgcatcggctgtttcctcgaccgtgacgaagccggacggcgaacgcttgccgcactcaccaagcgatatggggagcgtgtcaccgaccgttcctccctctatgacggttgcaaggacttgaacgagtacctgcaactgacaacgaaaaaacagaaaaacaaccatctaaaaatcgaagaaaaatgaacatacagaacaacagaaacaagagaaccaacatctttaaggcagtggcgttatgcctgatagtcgctgtgtcattcacccttgtgtcgtgtgacgacgacatggacatccagcagtcctatcccttcacggtggaggtcatgcccgtgccgaataaggtaacaaaggggcagacagtggaaatccgctgtgaactgaaaaaggagggcgacttcgcgggtacgctttataccatccgctatttccagttcgagggggaaggctcgctcaaaatggataacggcatcaccttcctgcccaacgaccgctacctgctggagaacgaaaagttccgcctgtactacacggcggagggtgacgaagcgcataatttcatcgtggtggtggaggacaatttcaaaaattcatacgaattggaatttgacttcaacaaccgcaatatcaaggatgacggtcttaccgccatttccatcggtaacttcagacccttgctgaaatgatgcgtgtattcatgacaatgctctgttcacttctggcggtctgttccgtgtccgcacggatcagccgccaagagggaacggacgggcaggcggcaatctaccggctgccacttttcgagcgggcggtgcgctgcacgaagtattttgagggctggcactcggaaaagcaccacccgtatgtggggtacggacaccgcttgctgccgggcgaaaggtattcggcacgaaccatgacaaagcggcaggctgacgcactcctgcggaaagacatgcggaacttctgcgcgatgttccggcagttcggaaaagacagtcttttgcttgccacgcttgcctacaatgtcggaccataccggcttttggggagcggaaagatacccaaaagctcgctgatccgaaagctggaggcgggcgacaggaacatctaccgggagtatatcgccttctgcaactacaagggaaaacgccactccatgctgctcaaacggaggaaggcggagtttgcactgctgtatgtaccataaaaggaagtgtgcataaaaaatcatccctgctacggaaatgtggtggggatgataatttcattatgaagctgtcatatatatttccgaataactatattttctgaaatctttttgtatgacatatgtagggtctggaataagcccaactaaatttcttagtctgcttattagttgctaattttgcaatactgtaaaaattaggacgtttataactatatggcaataattaatgataaatttaagcgagcaagattggaccaaagtccatatctgtttcatttcataaatggacgtgaccattctccttgtgatacgttacaaaagattttagaggaaaaacaattgattagcgataagggatatatttgtttttcggcatctcccataacagcgattaaacgtttctttgaagtaaaaaccaaaagcaccggacaacctatgtatttaccatggggattaggattttcaagagatatattagttcgtgattttggggcaagaaatgttatttatacggatggtaatgaagatataccagaacacttaaagtggagaactgatatattaaatgtggactcttatgattttgaatatctacgagagtggagaatcaaaggaaaaacatttaatttttctaattttcctcaaggagagattattgttattgctcccgatataaactcgttaaaccatttggtcgtaaagtttgatatgaagtttacaccgtatgtaaactattatactggcgatattgaagaagattggagtgaagaatttgtaagggaatggaaaggtatctcggtagataaattaggagttgataatttattagatgattttgctgtatcaggtgctactatttcacaagaaataggtgaagatatggtgaaaaaactaatatctgaaactccttggaatttactaacaaaaaaataatattatcatagattaaaacttgtttttttgtgaatggcatcgcagattggacagaggtttctttgctactttctttgtccgccatcatgctcaccgaaagaaagtagggcggctctcgccgccgccactcaaaagcgtgtgtaaagtcccgtcaccatcgtgaacatttcttccagcatatcaaaatagatgccctcgtgtacggcaatgtccttttccttgcactcgaaagtctttttgctgaatgtcctgcggtagaaccgcatattgtagaggtctgcccccgcatcatagatgatgtcaaggcggttggcacttgtcttgttccgtgtaaggctcatccgtaagccgttgcccatgtcgatgaaatcacggctgcccgtcatggcggtaaatcttcttccgcctatctgctgtaatatcgtcttggctatcatatccgttgtttttagggttttaagtgttggcggtgcggacaccgccaactcgttcaaaattctcgcatctcggcaatgggtgtctgccgttgcagccactccatattatactcgctcgtgatgactgccgtatggctgtcggtggcggtgaaacgtgtgctttcgtaatcatctatccaccctttgagggtgtccgttccccacgcttgggcatcgtcaaagataccgtccaatgtcgtgataggttcgctgaatttgactatcagcgtttgataggtcgtgttcatcggttgccctcctttccctgctttgcgttcagccacttgttccttgcggttcggcactcgtccaatgtgggtttgacacaagcgaacagttctccgtccgtatggcggtagtcgtactgcacaagtgtccgcctgcgtctgccgatacccgattggaaacgctcatatttctccgtacctgcttccgtacaggtgcttactccgttgatggtcattcgtgttgccataatgttgctttttatatgattaaaaatgtactgacagaactctgttcttcatcaccatttcggggttgctcgtgtagcgttgatgcaggtagaaatggtgttagctacatgtgagccgaagccgtaaaggaaaaacttgtcaagttcgtgcttctcggcaaactccttcacactttttctcaatccctcctcactcgttgtgagagtgaggaggtttacaaattcaatgaacatcgtggggattgcatcatcccacacacaaatcatactttcaattcttacttccatatcaatgttgttttagggtttatgctatgccactttcatccgctcacggataaggttggcgttcttgttcacaatgtctatgatacgttcgtggtattcggtgtcttggttgtacttgccgtggcactgcaccaccttgagtgtccgcaaatccacctctacggtttcaattatctcaccgccaatccttgccgagagtatgagggtgtcggctttcttgtagtattcactgccgaacacgcagatgttctgtgccttgccctcgctgtaatactcgtctatgctttcaagcaccttgatgattatttcctcgtccgtgattaccaatccgaagaatttggatttgttggcgatgaaatcttccgcatctttttccctttgcagttgccgctgttgctcacgctcacgcctttcaatctcccagcggcggcgttgctcggctcgttccttctcgtgtatggtttcaatctttcgggttgcgttgtcgtgtgccgccatgaaatcttcggggcagatgttcttcgggttgcggaggtcttgaccgagtttgttgagcatacgcagatagtcgcaccacatggagaagttgtctatccgatacttgtgacgcttggcaatcagatatgatgtccagcattcatcggcagtacgggcattgaaaagaaagtgtttcataacctcaatctcaccgcctttcataagggtttcaattcttgggtctgaaagcaaggctttgaaaagacgcacgggggaaatgccgtggaaatcgcccttgaagccattgcgtctgagttggggtaataccctcatcttgggatatgcacagcttcttgccacaacatcatcgtataggctgttgtgcggtcttatctccatcgcgctgcacaatgcccatacatcgcagtaatagaatgtgaagccacggagcaacgccatgtctgtaaccttaccgtcgggtgaaatccaacgctgcacaacctcgtggcagtagaagtgcatcggctcgcctttcctgctctcgcatctgacctgcatcacacggattacctgatagcctttgcaggtggttatcacgctgaaatactgcgtttccttgtagatacgtttgcgtgtgtcctgcactttgagtttggcatggcattgggggcaggtgcagccttcaagggtgtcgcacagtgcgctgtcgctgtgccactcgtgaccgcagtcggagcaggtaatgttccctttcttggtgcggtagccgatatgttcaacgcagtggcggtatgcccattcaatttgtgtcgttgatatggggcggaggttggctgaaagtcttgccacctctttctgtatcttggtcttcggtttcataagcctaaatcaaataatgagggttgggggtggttttcttttctcgctgacggtctgttgcggttctgcaacttgcggagttcctcctcttggtatctgcggactgcattctgacgtgcctccgccttttcctcttctgtgagttccacaacatggttcaccaccacttggcacgccataggtttgcccacctctatctcgttttcctcatagtagtggatggcttgcccaaatatctctccgtccgtgaagccgctgcaaccgcttttctgcacatagttcagaatgtgggtcacgcactcgtctatgtttttggcagggttgcggtacttcttcgcaaagagcgtatcttcctcagcccgctgttccagatacatttgtatcgttcttttgaaatggtctgttcctttcatatcgctgtcgtttttagattgtctgtttaagtatctctctccaataggtcggctctacctcgctaagaaggaagtccatgaagtccctccgtgcgtccttgttcagttcgtggtacaatcttcggaaagtgctaaaattgccgttgatgtacgtttccaccatatacacgaagatgttgtccacctcgtaatatctgcactgctgcgctaccgtcttgctgtttctctttgccatgtcggtaagggttaaagggttaataaccaaaggatgaagccgaagtaggcaatggtggaaaggatagccacgattacacctatcgccactcggaacactccgtttacaatctctctgatgatgccccaaaggatgccgaacaccccgaaggcggtgcgcatcatcaagccgcatatcgccaacccgatgtattgcgccacttgtctgaaatttgccgttgctgtcatatcttcgctgtttttgatttttttgttttttatgcggattcaagagctgagggagttgagtttcaaactatcttatctgcctctcgtttatccgacattttttttatgcgtctttctgtcgcatcggtcgttttcgtttcgggtgcttgaaaaggtagggattagggaatacaaggttttccggtcaaaatactacccgcagggctggagatttttaccgaaaacaggaggcttgaccttgctttcccgtcctatcccggaattacctttgcgcccagaacgaaaatgactgactgatgcggctcactgaaaggcgcaaaatggaggtaaacgaaaacagaggcagattgggtagaaaaaacttcaggggaaaatccgtaaaaagaggaaaccgtctgaaaccccgtaaaagcacctcttggcataggcgcaaaaagaaagaggcacagcatcatcagtctaaacatcgtttaggcgtgaggctgtgcctttttctccggctatgcggtagtcggcacacgtttgctcaaacccgttttgggcaatggtgttccgacggacaaaaccgcttttacggaaaaatcttatgaatgaggggataaaaaaatccgggagtttatatcaaaatctcggattaaatagctacttttgcatacgaagagttctttgaaggttacgcaacgcgcagaaggataatgcagtagataactaactaaatcgtaacctattactatcaagagtaattagcctacgctcatttccaataaattacactcttttcgtaacttctggaagcaaaagtacgaaaaaaattagaaacgacttctctttttttcttattgagaccgtgcggataaaaaaacggctggcggtgtaagatagtagttcgagctataaatgttaaatattgcccgatttgccgaaaaaagtgcggtgtgccgttcgtggtgtacgtcgctttttttatatttgtaactacgaatataggatgcggttcggtatagccaagtcggaaatataatttcctcttgtctctgcactcacctttcgctatatttgtaaacacgaatataggattcggttcggcatagtcaaatcggaaatataattccctcttgtctctgcactcacctttcactatatttgttcacaaagtgatatgtttgaaaaaacaacagccaaatcggctgatagtataatttatccaacaaataaaattatagaaaatatggacctaacattgaatttgaactcacgtttgcaacccatgcacagacatgatttggaagatgcacttcaagaaattcttgaaaagggaaaattgggagaagtaacgggtggaggaacactacaaagtccacaaaccggagaaattgtatcctgtgatatagagattcacctaaatgatgataaacaagatagtgtaaaccgtttggtggagcttatgaatataataggaatccccaaaggctcagctttattatgcacagcacctgaaattaagatagaagtagggactttggagggattggctttttatgtcaatggaacggatttaccagatgaaatttatgagagttgcgatatcaatcacgtcattgagcagatggaatcagcaatgaatggcataggtcgtttttatagttattgggaaggtaatgaatggacagccttgtatttttacggggtttcatttgttgaaatgaaacaaaaaatagaaccgttcattgcttcttatcctttatgtcaaaaaagtcgaatagaacaaattgcatagttggataacagtctcctatatacatctttttattgctgtgcggtatggtgtttctgcacaacaaatagtagaatggagcgatttgcagactataatggataactcgacggttcttatcgtgtggaatcgacacgggattgcaagccttatatgttgctaaatcgttgcttctatttcttaaacaattatctaaaattttatttttcaattagttaagataaaccgacgaaaatctaaaataaatttgtttctctacatcgcttctgctatctttgtaaatacgaagataggatgcggttcggcatagccaagtcgggaatgtgatttccgtttgtctttgcactcacctttcgctatctttgtcaatacgaagataggatgcggttcggcatagccaagtcgggaatgcgatttccgcttgtctctgcgctcacctttcgctatctttgtaaattatacatctatgattcatgtaacatagatgaatggaagtcatcggaatttaatgagatatgagaactggtatagtttatatggtggcaacggttttgtgtatttttgtaacctcttgttttacaggagtcgagagtacaaagaaaataactatgcccgatacaggcgaaattgcggcacagagtcccgaagatcgttttatagagtcttatttcgttcaacaagggtgcgatgcgtggcgcataggaaagccgttttattataccgatgaaaaactttcgttcgttttcagaccagaaaagcctactttcccggatagtatctctttgaaggggaaaatttttacgtatgccggaagtatagaagaaagtccttttggcggggacgacaaagttgtcttgttattcgattgcgaaggtcataagtttcgctatgaaacagggaagacccgggaggagatcggtcggttgaaatatacaccattgatacctccgttcatcgatatcgatgatttaaatatggctcgctctcttttgaaagacagagttctgtatataaaaacgcctatgtggtacaatgaaaaatcggaagcgatagaggggcgaaagttgatacctgtccgagttgtggatattcgtccgggaaataacgtgttgccggtcgaagtttggttcgaggacgataaaggaaatcaagcgggagttttcatgtcattgctttcttcttcccgctcccaatatatcacgttcgaccgcttgttttctttcgagaatccacgtttgcaatataaggaaatacaggacgatgcttgggagcaaattacgttgggaaaagtaaagacgggtatgacgaaggccgaatgtaaactttcgttgggcaatccgaacgaggtgaagaagattcccacatacagcggattgagagagcagtggatatacaactcgggagcgtatctgttttttgtcgatgatttgttggccgattataggttgtgatatgattaaggtagaggagaattattttataaaggacaggcatacattccacatgcccgtttataccaagtggtttgtagagtatgaaacggtcgaggagttggtgacgttgttgcagtccgatttattgcgggaacatacttttttcccgataggagggggaagcaatttgctttttgtaaaagaaatgtacaatggcgtattgttgcattctgccatacagggcatggctgtgtcggaggagaccgataccgaggtgcttgtggaaataggagcgggtgtcgtgtgggacgacttcgtcgcttggacggtctccaacggttgggggggagccgagaatttgtcgtacataccgggcgaagtgggagcgagcgccattcaaaacataggagcttacggcgtggaggtgaaagatattatccatgaagtaaaagcggtagatgtcgagacttgcgaatcccgtacctttcgaaatgcagagtgtaggtatggttacagaagcagtattttcaagcacgattggaagggtagatatatcgttacatcggtagtgtacagattgcaaaaatcgcccgaactacatttggattatggaaatctgcgggcttcattgtccggcgatgacatttctatcgctgatgtccgtaaagctgtcatagaaatcaggcggtcgaaattgccggaacccgatgaatatggcagtgccggtagttttttcatgaatcctgtaattcctacggaacaatatgagaagctgaaatcgtcttatcccgatatgcctcattacgtcgtagacgatatgcatgttaaggttcctgccggttggcttatcgatcgttgtggctggaaaggaaaaagtttcggcggtgcggcggtttatgagaagcagtgcttggtattgataaataaaaacaatgcaaagcccaacgatgtggttgctctcgcggaaatgattcgtaaatcggtatcggacacttatggtatcgttatcaatcctgaggttaattatattgaatgagtatgatgcaggttactttcttagggacaggaacttcaaccggaataccgcaaatcggttgtacgtgttcggtatgtacttctaccgatccgagggacagtcggttgagaacctcggccatagttgagatagagggtaagaacatattgatcgattgtggccccgattttcgtcagcaaatgttgcgattccatattaaacgaatcgatgcggtattggttactcatatacattatgaccataccggagggatagacgatttgcgtcctttcggggaaaacggtactgttcctatttatttggagccttcggtcgccgagggaatacgaaacaggttgccttattgttttgccgatcatcgttatccgggagttcccaatatttgtttgcaagagataggtctgtcaccgtttttaatagagggaatagaaattgttcccataagggtgatgcattataaattgcctatcttggggtatcgtataggacggtttgcttatataacggatgctcttactattcctgaatcggaatatgagaagttaaaagatatagatgtattggtcgtaaatgctttgcggaaaaagccccatctttcgcatcaaacgttagccgatgcgttgcgaatcatcgatagagtggggccgcgggaagcctacttggttcacatgagtcatcatatgggattgacttcggaggtagaaaaagaattgcctgcccatgtgcatttcgcatacgatggtttggttatcgacagcttgtgattattttgaaccatcttctttatagcttgttttagctataagaataaaaaacaatttgattatggcaaaaacaattcaaactgctatcgaagccggttctcgtatggctcccgcgaaattctatataaagattacgccggacggcccttatttgctttatggtaatcctcctatggatcaagagattatagttcctaatgacgaaggttcttcttggacctatcgtaagggtaaccattttagtacgacagaggagcctacggctttatgccgatgcggagcatccaagaacaagccttattgcgatggctcccatcatcatacggactgggacccgaaagagacggcatctcataagcctttattggaagatgccgaagaatatatagggccaactatggtacttgctgataatgaagaatattgcgctttcgctcgtttttgcgatgcctacggtagaatttggaatttggtacaaacggccgaatcccaagaagaacgtgacttagtcattcatgaagccgagcattgtccagccggccgtttggttgtttgggataaagaaacaggcgagatttttgaacctccatttgatccggcaataggattgatcgaagaccctgtgattaaagtcagcggccccatttgggtaaaaggaggaattcgtatagaaagttcggacggaagcagttatgagataagaaacagggttaccttgtgtcggtgcggacaatcgcaaaacaagcctttttgcgacgggacacatgtgtcggctaaatggcatgacaaattaccgatggagcaggaagcagaagtagaataagacgatatatgattttaggagatttgagtgacacgaagcgggtagaggctttgcatcccttgctggggaaacttttcagttatattaaagagcatgattttctttccgattcgattgggcgtatcgaattggacggtgatcgagttttcatcaacaacgattatccgatattacgttctcaatcggaacaagttgtagaggtacatcgacgttacctcgatgtgcatgttcctcttgatgctcctgaaatagtggggtggaagcctctgtgcgatttgaaggaggtgcagcaagcgtattccgaggagaaagattgtgccttttattccgataggccgtcgacttatttcaccgtatatcccggtcagtttctgattgtatttccagaggacggccatgctcctattatcggagagggtagactgcgcaaaatttgtgctaaaataaagttgtgatcgggtatcgattgagaatcgataaatatttttattcgtattatttacaaaggcaaatatatatacgacaataccctaaatctcgtggtaacaaaatttagggtattgtcgtatatggttacttttataaattatcctttattactttgcaaggatttccgactgctatgcaattggcgggtatagatttggtgacgacacttcccgctccgattgtcgtaccgtctcctatggttacgccgggtaggattatactgccacctccaatccaaacgtttttcccgatgttcaccggtttggtgagagatttccaaaaacagctgttttcgcccaaacgttcctgaggtgcggtgtgatggaagactgtatagatatgtacacccggacctattcccgaataatcgccgatagtgatggtattacaatccaaaaatacgcagttcatatttatttccacatttcgcccgatatgtatattctcaccgtagtccacgaagaagggagctgaaatccaaacattttctcctcttgatccaattaaatcgtctaataatgaggatagtttttctatatcgtcagatggggtatcgttatattctttttgtaattgctttgctttatgccatctgttgattaattctgtgtcaccgcaatcatagggctctccggcaagcattttctctttttctgttttcataatcttaaattattctcatggtctaacaaatatacgaaaaacggattgaaattttaatatctcaatccgtttttatgattcacatcaagaagtttctaatcttgtttttttgctttcatgctcgatatggttaaaaaggcaatgagcagcaaatacataatcaatccgacagtttgcagagtcgcttcactcaaatcgtgggtatactcgaatcctgcaaacttcattcccgcactgacgactcccatgagcgcaccgccggcaatgaatcccgaagccaataatgtgcccttatccaaacgggctttgttcagagcggtatcttttgaacggctgcctacataccaactgataagccctccgatgaccaaaggtgtatttagttccaacggaatgaacatacccaaagcgaacgccaaagccgggacattcagccatgtcagcagaacggcaagaatagcaccgattccatagagcatccacggtgcgccttgtcccatcatgaggggctcgataactgccgccatagcattggcctgaggtgctaccaaagcgttttccccggagaatccgtacgatttgttcagaatgaggataacacctcctacggttgcggcagagacgagtgtaccgaggaatttccaagtctcttgtttgcgaggagtagagcctatccagtaacctattttcaagtcggtaatgaatccgccggccatcgagagcgccgtacagaccacaccgccgataaccaacgcggcaaccattccgcttgtccctttaagtccgaccgccacaaggataaccgacgctagaatcagtgtcatcagtgtcattcccgaaacggggttcgttcccacgatagcgatagcatttgccgctacggtggtgaacaggaatgaaattccggcgactaccaagaaagcgaccgttgcttgcatgaaattattgataactcccaaatagaagaacaggaatgtgataatcaaggcgaatacggcagccgagatgatgaatttcatagagaggtctcgttgtgtgcggggggcttgatcctctatcgctcccttatttttccccgaaaattcttttgtagccagtcctacggctcctttaatgataccccaagagcggataatacctatcactcccgccatagctataccgccgatacctatgtaccggccgtaatcggtaaatatctgttcgggagcagccgcagctaattcgctaccgggtatgctgcccagcagaggaatgatgacgaaccaaacgaaaagagagccggaacaaataatcaagcaatatttcaagccgacaatgtatccgagtcctaacacggctgcgcctgtgttcactttaaataccatttttgcgtggttggcgatctctgttccccacggtaaaatgcgggtggtaagcacttcgctccaccagccgaacgtcgagaggcaaaaatcgtacagaccacctaccaatcctgccagaatcaaaggcttggcttggttaccggctttttctcccgaaacaagtacctgagtcgtagccgtagcttcggggaaggggtatttcccgtgcatatccgaaacgaaatatttgcggaacggaatgagaaacaagatacccaatataccgcctagcagcgaactcatgaatacttccataaagttcacggtcagttcggggtatttggcttgtaaaatgtatagagccggcaaagtgaagatagcaccggcgacaatcactcctgaacaggctccgatggactggataattacattctcgcccaatgcgtttttccgtttagcggctcccgatagtcctacggctattatggcgataggtatggcggcctcgaatacttggccgactttcaaacctaaaaatgctgcagcggccgagaagataacagccatgacaataccccacgagactgaccatgcattgacttcgggatagactttttcgggcgaaagaatgggtttgtactcttcgcccggttttaattcccgaaatgcgttttcgggcaaatcgacaggttgtttttcgtttgtttccatattatatttttattttttgtgtattgctttttcttaaaaacgtggcaagttaataaaaaatgcaaatatagccgataacttaggcggcgtttttgataattatattacaaaatgaaaatttatgcgaggaagaaagtaaaaaaacttgtacatttgttacgatataaacactgagaagatgaaagaaatattggattatttgtcccgattgagagaaaacaacaatagagaatggtttcaagctcataaggaagagtatgatcggttgcgtcctttgtttgttgagaaaatccaagaacttatacagcaaatatcgcagttcgacgaagatatcgtggggttggaggctaagaactgtatgtatcgcatttatcgtgatattcgtttctcgccggataaaactccgtataaatcgtatatgtccgcttatatagcgaagggtggccgtaaaagtttgcgagccgggtattatttccatttcgaaccggggaattgtctgttgagcgggggcgtttggtgtccggaacccaaattgttgaaagctctgcgccaagcggtttacgataattatgacgagctgaaagatattgtggaaaacaaagagtttaaatcgttgtatcgggactgggtaggggaaactttgaaaatcgttccccgaccgtttccacgggattgcgaacaagccgcatggcttaaacgaaaagattatgtggtggtgaatgtgaagcctgatgattttttcggttcgcccgattggatcgaaaaagcggctcatgattttcacatcatgaaaccgctgaacgattttctcaattatacggtcgatgaagtttacgatttataggaaataggaaggggagaggaattgcctgactaagaagttgttttaaatttattgagaaataatattatcattgcaagcaggtatgttccggccatattgcgcccctgtctcggaataaatttaaaacagcttctaaggtggctcgctcctccttttttcagtttagttccacgaccgtaataccggctcctcccaactggacgtgttcgtcttggaagtgggagactcccggtacagttttgaggtattgtctgatgacttgtcgaagaacgccagttccagtgccatgcagaatgcgtacgcgagtacaacctacttgtatggcatcgtctatgaaataggtaacagcttgtaacgcttcgtcggcccgcatgcctctcacatcgatttcttgcttgaaattcagttgcttttcccttatatcgtcggttgtttgcgaactgataaaagtggctttcgaattttcttttttgatttggtttttgctgaccttttccaagcggtcggctttgacggtcgatttcagcagtccgaaagcgacggtaatttcattatcgttgacggaaaggacttcacccacagaattttggcctttcaagcgaacggagtcgcctttcattaaaacggtgtgagcggtaggttgtagattgctttcttctcttttttgttgtttccgttttttccggtcgttgatctgtttgagctttttgctgattttgtcgtcgacggtcggggtttcttccaattcggttttgaattgttcaaatttctgccgggctatgcgggttttttctttctctgcttgcgcctctttaatttcccgtatcgtgttttcgatacgtgcattggcttctgcgagaagttgggccgcatctcctttcgcttgtttcaacagttccttgcgttgtttttccaaagcgatcaaatcggcttcataccgggcggttagttcttcgagctttttctcccgttggcgtatgttctgccgtttactttcccagtagcgtttgtcccgaacgatgtcttgcaaatatttatccatatttatgtatgccgaacctactttttctgatgcggcagcgattacttcttcgggaagtcctatcttacgggcgatttcaatggcgaacgaactccccggattgccaatggatagtttgaacaagggttgcatcagatggcggtcataaagcatggctccgtttatgattccttctgaatcttcggcaaagtgtttcaagttttgatagtgggtcgtgatgattccataggcatgtttttggttgaatcggtccaataatgcttctgctatggctcctccgatttgcggttcggttcccccgccgaattcgtcgataagtaaaaggctgttctcattcgcattacgtacgaaatacttcatgtgtgtgaggtgcgaactatatgtacttaaatcgtcttcgatggattgctcgtcgccgatgtcgataaatatatccttgaatatgccggttcgggaattgtcgtgcatgggaaccaacagtccgcattgcaacatatattgtaaaagcccgacggttttgagacagaccgattttcccccggcattcgggccggagatgagcagtattctgttcttttcgtctaacgtcaaatcgagtggtacgattgttttcccttgccgtttcaacgataggtaaagcaaggggtgtacggcgtgaaaccattcgatttgccgagtattttcaaaagtgggtaagactccgcctatttcctcggcaaagagggctttcgcccgaataaagtcgatttcggcgaggaattcataggagtagatgatttcatcgatagccggacgaagttcgtcggtaaacgatgttaaaatacgtgtgatttctcgacgttcttcgttttcgagttccctaactcgattgttcgcttccacaacttcggcaggttcgatgaatatggtctttccgctagccgattcgtcgtgtacgatacccctgatttttcgtttgtacgaaggtgctaccggtatgaccaagcgtccgtctcgcatagtggggctgacttctttatctacgaatccttcgctctgggcagtcctcagtattgcattcagacttcgggatataccagataacgtggaggatatattactgcgaatgtgagccagttggggggaggcattgtctttgatatgtccgaacttatcgagaatgagatcgattcgtttgattaaatcgggaaaagaacttatctctttcgacagtttatatagataagggtatttgatttcttcctcttctccgggatataaaaatcggataatgcgttgtatggtgtcgagcgacctccgcaggtcgaataattcggcttcttccaaaaaggttccttctatacgaactcgttttatcgacggtcgtacatcgaaaaagaaatcggcgggaaagtcatcggcattttcaagaatgcgtacaaattcccatgtttgattcagttgttcccgtatagattcgtaaccggtagaaaacgtcattctatcggtataatcgatacccaatgtgctgagacatttttctttaatgagcgatcgaatttggtcgaatcctattttttgttcgaaattttgtggatatatcacgctttatgatttataaaacgttgcaaatgtaataaaaagacagatgatatacattatttatcgttgaacaatacatgtgattcgggtgtattatgaataactaaaataaaaattatggaagctgtgaatagtgtttataaagaagtgaagaaaatgtttcagatggcggttccaccgtatgtcgctaccgttaacgacgattatcattatgaagtttgggctataaagaagcaggcaggggaatcccaagtttcggaagaattattggggtatgtagccaagcatgaagacagtgtcactgtgggatttaacaataagctcggtgaaaagataagaaaagaggccttttcgtcgcttttattggctaaaatgaatattcatggaagaatccgtattcatcgtatgacgcatcagttacacatcgatttacagaatgcgatagataatttaatgcgatattatacagagatgaactggatttgatgagggactatggttatttcacttttcttgtatgttgccatatcgtttccatttttttgaatagaagtttcgtgtatgggaaaagtaaaatggacggttgggtttggtatgaaaaatactcgttcattttgtccttctcttagcttttcgtatatttgcgcacttataaataatgcgcatttatgacacagattgaaactaacaatgagatagaagacaagaaaagtcttaatttcatagaacagatagttgaagccgatttgaaagccggaaagaatggcggccgtttgaatacgcgtttcccgccagagcctaacggttatctgcatatagggcatgcgaaagcgatctgtatggatttcggaattgccgaaaagttcggaggtacatgtaatttgcgatttgacgataccaatccggtgaaggaggacgtagaatatgtagactccataatggaagatattcattggttggggttcgattggggagaccggttgtattatgcatccgattactttcccaagttatgggacttggccattcgtttaatcaaggagggtaaagcctatgtcgacgaacaatcttcggaagagatagcccgccaaaagggtactcctacacagccggggatagaaagcccttatcggaatagaagcgtagaggaaaatctcgatttgttcgagcgaatgaataagggcgaattcgaggaaggtcgttttgtcttacgtgcgaaaatagacatggcttctcccaatatgcacttccgcgatcctatcatgtaccgtattatcaagcatcctcatcatcgtaccggaacgaaatggaatgtatatcccatgtatgatttcgcacatgggcaatcggattatttcgaaggggtgactcattcgatttgtaccttggagttcgaggtgcatcgtcctttatatgagtattttgtaaaggaattggccgacgatagttattgccctcgccagatagagttcaaccgtttgaatttgacctatacggtgatgagcaaacggaaacttttacagttggtaaaagagggtctggttgccggctgggacgatcctcgtatgccgacgatttgcggattgcgccgtcgtggatatacgcctgaatccataaagaattttatacagaaaataggttatacaaaatacgacggaatcatcagtgtttctttactcgaacatagtatccgggaagatctgaataaaacagctacccgtgtatcggcagttcttaatcctgttaaattgattattaccaattatccggaaaataaagtggaatatttggaaaccgagaataatcccgaagacccggaggcaggaacccatcaaatacctttcacccgagagctatacatagagcgggacgattttatggaaaatcctcccaaaaaattcttccgtttagctcccgatcaggaagtgagattgaagtcggcatatataatcaagtgcaccggaattaaaaaagattccgatggaaacgtagaagaaatttattgtgaatacgatcccgatacacgaagcggtatgccgggaagtatgcgcaaagtgaaaggtacgttacattgggtatcggcagaatatagttcgacggcagaagtcaggttgtatgaccggctattcaatgtagaaaatccggcagaagagaaagatgtggatttcagagaattattaaatcccgattctctaaaaatcgtcgataattgccgtatcgagccttacttggccgagaatgccaagcccggcaatcgatatcaattccagcgtacaggatatttttgtgtggacccggattcgaccgatggacatttggtgttcaataggaccgtatctttgaaagacagctgggaaaaattaaaatcgaagtaaagtataaatttattttctatactgtcggattccttatgtataagggattcgacagtttttatctgaatctgcaatgtcagctaaaaagccgaatgaactcatagaccgctacgaagaaatgttgcgcgggacagttagttgttatttcgatacagacgagatagatgaaatctcggattattatgagtccaaagggcagttgtccaaagcgttgcacgctattgagttcgggttgaatcttcaccccgacaatgtggatttgaagctcaaagaggctcgttatatgctttatctcgatagagcagatgaagcgaaaagaattatgtccgaactggccgattatagtcttgatgccacacttattcgggctgagctgttatttatcgacggttatatgagtgatggccatgcgttgttgcttgctatgttggataacgacgatattcgggaagatttttgtttcgatgccgtggatatatataccgattacgattgtttcgatgaattggtggagttcgtggagaaagcgggaaaggtgttacccgatagccgggagctgtttcgagaaatggcggctatctgcgaagagcgttcggagtatgagcgatctgtcattatttataataaattgatagacaaagacccttattcgttgcaggattggttttctttggccaaagtcgaggctttgttaaaacattatgacaaagcggtggaggcttgtgattttgcattggcggtgaaagaaaatgaagaatcgataatctcgtttaaaggatattgttattacgactccggacaatatgagaaggccatagaacagtttcttgaatatgagtctatcacaaaggaaaaatcggttgcttatgaattgatcggggagtgctatgtgaaattggacgataacaacaatgcgttgaagttttttcacaaggctctcgatatagagccttcgaactcgaatatatgttatcagttggctacttgttattatgaattgggagatatacagaaagccgttgtttatttgagagatactttaagccttgatagtagggacgacgaggctcattcgtttttaggtgaaattcttttgcaggaaggagactacgaagaagcctattatcatttgtccaagtcgttggagttgaatgaagacgatatggaaactatgaaacttaaaggcgaggcgtgccttcatctcgaatattatgaagaggctgtttctgtgtttgaaacagtgcttcgggaagattcatacgacctgcattgcaggcttaaattagccctcgcttatgcgaagatgggcgatgacgcgaatgctgagcgccagatacaaatcatagaccaaatgagccagtctgccgattttagcggtttaccgaatgagaagtcgcaacagtggaaaaatgtgcatggagccattcaatcgttaaagtgctttttattggatcatatagatgattcggaaaataaagaatccctttcataaaaagggattctcgatttgttcgataccgatctctgtttccggtccgtgaccgggatatacgattgtttctttcggtagagtaagtaatcttgttcgtatagattcgaccaactgatgatgatttcctcccggcaaatcggttcttccaatgctcatttggaaaagcgcatcgcccgacagtacaaaccctgaatcgggggcataaaaagccatacttcccggagagtgtccgggtatggcaatcgcttttaatttttcatgaccgaggtcaaatgtgtctttatcggaaatataatgcccaatcggctgtatttctcctcgaaacggaataccgaaagattcgcattggcgtgccatattttgtaagagaaattcgtcgtcttccgctgcatataatataactccatattttgttgccacgaaagaattaccgaaacagtgatcgaagtgcagatgcgtagctaacaaatattttacggtcagtttattatcgtcaatgaattcggcaagagtttcttcttctttcggataatagcatccggcatcgacgatggtgcattccctactggccgtgtcccataaaacataggtatttaccgggagcatgttgaattgaaatcgggcaattctcatttgaacctatttttttacaatttgcacatagacgacttttttcgtgtcgaaataatcttctttgaaatagtctttcaggtcgaatacgatcgatgtctttttcactgtaacgagttcgttttgtaattcaccgccttttagacagagaagtccgttgggaagcgcgtttcgttgttctttttttatgtttttccgtatcagtttcaatagatcgggtaggggcataaccgcccggcttaccacgaaatcgtattcggacttgttttcttctacgcttccgtgctgaaaagtcacattttccaaatcaatggattcggcgacgttcgcggcgacttttattttttttccgatgcggtctatcagatggaatttacattccgggaaaagtatggcgaggggaataccgggaaaccctcctccggttcccacgtcgagaatctcggaaccatctgcgaaatttatcgttttggcaattcccaaagagtgcaggatatggtggaggtacaagttctctatgtctttgcgagagataacattgatctttgcattccagtcggtatataactgtcccaaagccataaattgattttcctgcttcggtgtcagattcgggaagtatgtttttatatattgcatggtttgctgtttatttgattaaacgacgaacggggctgtcgggtaaaatatagctgtcgatctctttgaacggtatttctatactggtttgccctgtcgcataacaagctatttcgtaagggttatatacccaacagataccggtatcggtcagataaaagttttcggtagccatgatatcttccgtgtcgaaatagcctagttccagtagggagtcgggtgacgatacattcagttgtttcatcagccggtttaataagatagaactaagtgtatccgatgaatcgggctggaaaatatcgtctaaacctattcttttccagttggagaggtctatcgtgtaataacgattcgaatacatgccatgggctccgcccgtatattcggacgaggatattccgtaacagaagaaatcattgcgattgtaaacgggagaaagggtgtaatcgaagtcccattcgaaagaataagcctctccgcttttcgccagttctttttcgaattcgggttctatttctttataggcgttcacatgagactctacgaccttttgtgcggcttgtttcaaggagtctcccgtatattcgtctccaaaggttagaggggaaagtattttttgcaaatgaaggtaatcgctgtcttgtttgtattttacaggaatttccattgtcaagacaactttacaagcaggctttgcggtatctccggagagatggtaggtgtctgcgatgactaatttttccaccacaacagaatcggcattcgtttcatttgaatgattattcttgaaattacaagagtacagacagcttatcaatgctattatactcaataacgatacttttttcatataaataagttttttacaaaaatacaccttttgttgtgcttggcaagggaaaagaagcaaaaaaggaatagtattatgcgagcacccggttttcgggatttttataatttctgttgaaagatttgtgtacatttgcataagcgcgaagatgggctacattcggcataaccaaataaatttgtttctgccctcgtttgcactatctttgcaataagattcgtgtaaaataaacctatatgttacaagtcggaaaattcaataagctcaaagttgttaaaacggtcgatttcggcgtttacctcgacgggggagagaagggagaaattttattaccacggaagttcgttccggaacaatcatgcagtgaaggcggagagatagatgtcttcgtttattatgattcggaagaccggcttattgcaacgacacaaaaaccgtatgcacaagtaggtgaatttgcgtggttacaggtaaagtcggtgaatagaatcggcgcatttttggattggggagtagaggcgaaagatttgttggtcccgtttcgggaacaaaatacggatatgcagcaaggcgagttttatattgtatatgtatatctcgactttgctaccggccgaatagtcgcttccgcaaaattggataaatttttagacaatgtccctcctgaatatgaggcgaatcaacctgtcgaaatcatagtaactcaaaggactccgctcggatacaaggttattatcgataatttgcattggggggtgatttatcacaacgagattttcagacctataaccattggggaacacttgcgtgcttatgtaaaacaagtgagggaagatgataagatagatgtgatgttacagcttccgggatatgaaaaaatagacccgttgtgtgaatcgattttacagaagttgaatgaagcgggaggggtgttacgactttcggataaatcgcccgccgaggagattgcacattatttccagtgtagcaagaagagctttaaaaaagcgataggcgctttgtataaagctcgacgcattgttatcgaagagaactctattcgtaagtcataataacggttcggtagaaaatccgagggggtaggccggaattttaacgagtgcgatggattgcatcccctgtgtttcggtagcaataggggagataccgacggaacggtagtttttgaggagagagattggaaagatttcataagtttttttagcagtgtgggttaacccctccgtccttgcggacacctcccctgccgtgccccgcaatgctacggggcacggcaggggaggtgttttaaaatatctctgatagtaaaaattgaaacaccccgtaaggctatgggatacggcaagggagaaggtctaaaatgtctctacgaatattctttttcctctctatctgcgagtacaagagttaaaagacaatcttcactaattatcgactgaaccataataaccgttatcttttcgcaagttaaaagaacttttttctacaactgttgtttaagagttgtaaagtttctgttttggaaaccgaataacttttaacaggtactaaataataaaaacagttatgaaaagagtcttcattatgttagccattgtgctgggaagcgcagggttattgttcgctcaaaaaagcaatcaaaaagaggtaaaacagttgcaaagttttttgcagcaaaaatcggctaagggagatgccaattatattcgtttaggaattaccgacattaagaatcctgcaatgtggaagggggtagtatggagcgatggccgtgctatttctatcgattggaaggataaggaattggccggagaattggatttgaatggatttacggctttgcaaaaagtcgattgttcgcgcaatcagttgacggagattaatgtgtctaactgtactgcgctcaatacattgaatgtcagcaggaacaagctgtcggagttgaatatagacaattgtcctgcattggttaagctcgattgttataaaaatcgcttgaccgatttgtctctctccgggcttcccggtttgaaaaatctgaattgttccaataatttgttcgtggaacttaatgtaaacggagctcagcaattacagagtttgaatgttcagggctgtcatcttgaatcgttgagtgtcgatagttgtgaaaatcttaaaaatctatattgtggttataataaattgaccagtttgaatctgttcgggacggtcagtctgtctaatttgaatatcgacgataacgaaatatcgaatatgcttttgtccaaattaccgtctcttacgtctcttatttgcagtgacaacaatatgaagacattgggtgtactcgattgtacgtcgttggccgatttggtgtgttcgtataacgatttaacttctttgaacctcgacgggactactaatctgtattttgtcgattgctcgtacaacgacctttcgacactcgatttgagcaatagaaccatgttacaacgattgatttgcagtaataaccagttgaatgtcctcgatgtatcgttttgtccgaatttggtttatatcaattgccggtataatcaattaaccgatttgcgcactatcggggataataacttgcgtatgatcgcttgccaatggaattattgatgaacccgaatgaattgtaacgaaggtgggataatgtcgtttcgggcattatcccacttttatttttaggctatttgtttttttagtctactttattctacaatatatttttcttctttgtttgatttcaaaaatatccccgatttcaatcttctgtattcccatgagtctgatagtttagtcgtcgaaataaggtgtacttatgtaatatagataaaaatctaccgggatattcagtttggcgattcttttccacatgtcgggccgtattctgaactggaagttataatgtcccatactgcaatggagtatcagtccgctgtttttgaaacggcggaaaacttttcgaaacgactctgaacggctttctatcaagtccaatatttcgttggattgatataccagatcgaagtatttcgatgattttcggttgtcgaatgtatcgtaaaaccagacgtttttctcatcgaagaccgggtgagtgccgagctcggtgtagggtannnnnnnnnntatctcggtaacgatacccgggtcattctttccggtctcgatatagagcgtacagcccatttcggttccggtcttgattcggttaatgttatttttcttgctgttactgaacaggtacaggtcgaagtcgaccaacaatccgtacggagcgatacgcctccacagttccggtggaatgcggaattgaagtttatgccggttgacatagcagaaatgaagaaggcatttgtatttgtagtttctaaaaatcttttggaaagagcttttctgtttctcgatcatttcgagcatatcgatcgatttgaaaggtatcagatggtcgtctttttcaaaataggcagtaccggataattcccacaggttttgtttaaagaactttccgggtatttctttgtgtgatcttgttctgaatatttcgccttttgttgtggcccacgagggttgtataccggtcatacgggttacgaccgagggagcatcttcttcggtatcgatccaaaaatcgcatcccatttctattattttatcgttaaattctgccatttaattctactattattttttaatccatttctattctacaagttatggaaatacattttctttgtttgatttcacaaatatccccgatttcaattttctgtattcccatgagtctgatagtttagtcgttgaaataaggtgtacttatgtagtatagataaaaatctaccgggatattcagcttggcgattcttttccacatgtcgggccgtattctgaactggaagttataatgtcccatactgcaatggagtatcagcccgctgtttttaaaacggcggaaaacttttcggaacgattctaaacggctttctaccaagtccaatatttcgttggattgatataccagatcgaaataattcgatgcttttcggttgtcgaacgtgtcatagaaccagacgtttttctcatcgaagaccgggtgagtgccgagctcggtgtagggtatgtcggggtatcctttccgtttgatacgggtgggggacattccggtcatctcggtaacgatacccgggtcattctttccggtctcgatatagagcgtacagcccatctcggttccggtcttgattcggttaatgttattttttttgcttttactgagcaggtacaggtcgaagtcgaccaacaatccgtacggagcgatacgtctccacagttccggtggaatgcggaattgaagtttatgccggttggtatagcagaaatgaaggaggcatttgtatttgtagtttctaaaaatcttttggaaagaacttttctgtttctcaatcatttcgagcatatcgatcgatctgaaaggtatcagatggtcgtctttttcaaaataggtagtgccggataatttccacagattttgtttaaagaattttccgggtatttccctgcttggcattatttcattaggtatggtcctaaatatttcgccttttgttgtagcccacgagggttgtatgccggtcatgcgggttacgaccgagggagcatcttcttcggtatcgatccaaaaatcgcatcccattctaatttttttattgtcgaatgtaatcattacttttaatcttcctttattctatgagttatgggaataatagcatgtaattttaatgctttttccgtagtaatttatcatcaatctatggaggcaaaaagattctcatatttacttagtgaggtgagataattgttcttatattcgataagacgtattttggagaaagggattctttgtgattgtataaagttcgtctgttcatctattttattgagaacaatggatttacggttgatcttggaaattttcccgacaaggatataatcgtccgattccaatcctatcgctatgttttcttttttctccatgaaggtactgaaaatgtgcatggtatttgtacaatctataccctttccttcatatttccacataggtgaatagtttagagaaaggatttttgccgaaattctatctgttgaaactatatttttttgtttaatgaaatttttattgataaataaatatccgtcgaaattaaaatctctctgactttggtgaagaataatccattcttcattttcttgaatgaccacacctttatatatttcattgtggttattaaccttgatttcccagatttccaatcgggggatttttgtggagtctgtcgttatatatttttgataagcgcacgaataacgagtgttcactcgaaaaaagcgaatcttctgtaaagggaattttttatatccaatccattgtgcttgtttatctaaaatcctcattgttatgtattgttcgttgatattttttatttctccaagccaaaatttatgagctttgtgttgccatatctcaacgagtttctctttatctttatcaaataaagcgggaggaaatagaagcgtagaatttatgagctcccattttgagttggaaaatatatagtctgctattctgtctgtttcgatatgaaaatggtctatccactctcgattgatgaatgtatatccatcgaggacatagtcatatgtattttccaaaacagcgacccaattgttatcatggttcacgtaaaggccagtgatgggctcttttcgttgttttatttttatggtaacaagattcttatttgtaacgttttctccttttatctcctttttcatcttctgtttatgattcttgttctgtatattcgtcttcccaagtttccgggttccaatttttttcaatacggtctattaaaaattctataccccagattccataaggaggatatttctgttgcttttttgtcggtttttttactagttttcgctccaaagtatggttattgactataacccaccctttgaacactccgcaaaccgtttctactgttttgaaatatttagggactttgaactttttgacttcggaaaagccgactttgcgaatgtattttcttcgtaaagctattcccaacggaacgaaacagatatatcgttctttctgttggactaatttttccaaatcgacaggttcatggtatacccccggaagcaagcgtatcaatgtcgtttggtctacttcggccatgtattggatatatgcatttcctattgccgtggggacttcaaaaatatccccgatttcaatcttctgtgttcccatgagtccaatggtttagtcgtcgaaataaggcgtacttatgtagtatagataaaaatctaccgggatattcagcttggcgattcttttccacatgtcgggccgtattctgaactggaagttataatgtcccatactgcaatggagtatcagtccgctgtttttgaaacggcggaaaacttttcgaaacgattctaaacggctttctaccaagtccaatatttcgttggattgatataccagatcgaagtatttcgatgcttttcggttgtcgaatgtatcgtaaaaccagacgtttttctcatcgaagaccgggtgagtgccgagctcggtgtagggtatgtcggggtatcctttccgtttgatacgggtgggggatattccggtcatctcggtaacgatacccgggtcattctttccggtctcgatatagagcgtacagcccatttcggttccggccttgattcggttaatgttattttttttgcttttactgagtaggtacaggtcgaagtcgaccaacaatccgtacggtgcgatacgcttccacagttccggcggaatgcggaattgaagtttatgccggttggtatagcagaaatggaggaggcatttgtatttgtagttcctaaaaatcttttggaaagaacttttctgtttctcgatcatttcgagcatatcgatcgatttgaaaggtatcagatggtcgtctttttcaaaataggcagtaccggataatttccacaggttttgtttaaagaactttccgggtatttctttgtggtatcttgttttgaatatttcgccttttgttgtggcccacgatggttgtataccggtcatacgggttacgaccgagggagcatcttcttcggtatcgatccaaaaatcgcatcccattttaattattctattttttaataagcccatagtaattatatcatttaatatttgaaagtaaggctacttatcatctccaaatggcattgattgtgcaatggaatttttttgagaatcctaataatgcacaaaatatcagcatggtatttcgatagaatttcatagtacgcaaattggggtgtttcttttctcaaagaaagggaatatttattaaaaaacaaaatattctcaaaaaaaaataaaaggcgattgactttaatgagttaatcgcctacaaaaaatatatacttatactcattcatcggccgattcgtgtttgcggtattcttcgatcatatagccttttacttccttgaataagcgagtcgcaaagacaaagtcgttcagagcttcgttagatgatgtgaatattttggcacgatttcctacccactctctgtgtcctttattaataaagacaatattttcaccgattcctattacagagttcatatcgtgggtattgatgattgtcgttatattgtattcgtgtgtaatatcgcttaataattcgtcgataaggatagaggttttcggatcgagtcccgagttaggctcatcacaaaataagtacttgggattcaatgcgatggcacgagctatcgccacgcgtttttgcatacctccgctgatctccgacggatacaaatcgttaactccttttagattaacacgctctaaacaaaattctgctctttttttacaagcggcataggtgtctcgtgtgaacattcttagcggaaacatgacattgcccaataccgtctctgaatcgaatagggccgagccttgaaatagcatgcctatttcgttccgaagttctttaatttgtgaagccgacatcgaagtgatgtctctaccgtcataaataacttgtcctttatcgggttgcatgagaccaacgatacatttcatcaataccgttttgcccgatccactttgcccgataattaagtttgtctttccagagtagaatttggcggagacattgtgtagaatgactttcccgtcgaatgatttggatatattattaacttctatcatcaaaataaaatttgagtgagaaccacgtcgagaagtaaaacgataacgctgcttacgacgacagagtcggtactggcttgcccgacttcgagtgctccacctttcactttgtatccatagtacgaggctacgctactgatgacaaaggcgaagaatagtgctttgaatatggcttgccaaatgtaatattcattaaaaaaactttgtagtccatagatgtattttgacacggaaattatgtcggtgaattgggctatcaggaatccgcctgtaataccactcgccatactgaacacgaccaataccggaatgaaagagaccattgccgcgattttgggtaatatcaacaggttggcagagttgacgcccataatttcaagtgcgtctatttgctcggttacccgcatggttcctatttcggaggctatgtttgacccgactttaccggccaagatcagacataatatggaagaggaaaattccaataagatgacatctcgggtagccaatcctacggcgtaggccggtatcatgggcgataccacattcttttgcatttgtatggcaatcacggctccgatgaaaacggaaatagtaatgacgatgggaatagagtctattcctaatttgtatatttcggaaatatatcttttgaaaaactctctccatcggtccggtattgtaaatacgcgtctcattaacaagacgtaatctccgaacttttttaatgaatcttgtataatcatatccgctaattggattattgaagaacaaaagtaatgaaaaagaatcgatgagccattatcttttatagtagaattaagttcttaatcattttatttcgttaaaacggctgatgggattgtctattttcaatatctttgtctctgtgaagatagaatgcggtttggcatagtcaagtcgaaaatgcaattttcgcttgcctctgcgcttacctttcactatttttgcagataattttaaaggtagaaatatgttttccaaattttttaagcatcaaccggtggctgccaataccgaagagaaggttcatttgaatgttcaatcggatttggaatcttcggaaaataatatggtgctgcgaaccgaagatttggtaaagaaatatcgtcagcggacggttgtgaaccatgtgtcgatagatgttacacagggggaaatcgtgggattattgggcccgaatggtgcagggaagacaacgactttctatatgacgaccggattgataacccccaatcaggggcatatttatctgaatgatctcgacattacagattatccggtttataaacgggcgcaaatcggtatcggatatttggcgcaagaggcttcggtatttcgcaagttgtcggtggaagataatatccggtgtgtcttggaaatgactcataccaccaaagagtatcagcgggataaactggaaagtttaatcgctgagtttcgattacagaaggtacgtaaaaatttgggagaccaactatcgggaggtgaaaggcgtagaaccgaaatagcacgctgtttggctattagtcctaaatttattatgctcgatgagccttttgcaggagtcgatcctattgccgtggaagatatccagtctattgtatataagctgaaagaaaaaaatattggcattttgataaccgaccataatgcacctgaaacactgagtattaccgaccgtgcttatttattattcgagggtaaaatactttttcagggcacatcggaggaattggcagaaaatcccgttgtccgggaaaaatatttagggcgtaattttatcttccatcggaaaaaattcctttgatttcgagaaaaaaacttttttataaagcacgtataataaaattaccgtaccgataaggctcgctcctgccagccagctcgtaggggaaccgctcgtgccgaccgtctctatcagattatcgggggatttgtcatttgtaaaataggaaatgcacgcgaccgtgctgttattgaacaggtgggcgaatatcggtagccatagatttttgctccataccaatagatatccgaagaatgcgcctaataataatcgaggtataaaaccatagaattgtaaatgtatggcactgaacaggaatgcacaaatccacacggctacatgtgcccggtgatttttgtcttgtacgattcgttgaagaacacctctgaaaatcatttcttcgccaattccggtgaggattccaatcccgaaaatgacggctaagaaatgagaaaatgaatttacttgcagaatttgttcggttatctttgtcgcagcattttcttgttgacgcatccattgttcaatattatacagcgcttcgggcaggtgcatggcttcattccattctacgattctgttaagagccggagtcgcaacgatgaataaagcgattatccctaacaattctatgatacgcggggctttattcaaataaagggattttcctgcatttccccaaaacagagtcgcagcgatccatgccgggagaatgaacatgcctatgttttgtaaatacatggctatcaacaatgcattagagccttttacaaaaaacatgggaatggcaacgattagagctccccataaaattaagagtagcagaatgataagctttattcctgtcgatgagttatggcaatatcccgagattctcatgtattcattgttttttcgtgtacaaatataacgcagatgtcattaaaatatgcggttgtgtggcaactgtttcatattttacgcaaaggtagcaaaaataaatataaggatagtttgtcaaaagagaaagaatataagcaatatgtgcgtgttttgtcaatataatttttgaaaatgtagataaatatttatatttgcaaatataaatgtggcaattttataatttatgaaagtctctatcataaaatataatgccggaaatgtatattcggtcgaatgtgcgttacgccgattgggtgtaacgccggttgttagcgattctcccgacgtgttgtcgcaatccgacaaggttctttttcccggagtgggagaggcttcttcggcgatgaaatatttgcaagagcacgggttagatagggttatcgtcgatctcacgcagccggtgttggctatttgcatcggattgcagcttttatgcaaacactccgaagaaggagatgttgacacattgggtatattcgatacggtagtccgtcgatttgttccagaagataccgaacagaagattcctcacatggggtggaatgcgttgacttgtttgaaaggccctttgttcgccggtattcccgaaggtagctatgcctattttgtacatagttattatgctcctgtatcggcgttttccgtggcggagtgtaactatgtaattccatttagtgcggctttaaataaaggtaatttttatgcgacccagttccatgtggaaaagagcggtacagtgggtatgcgaattcttgaaaattttctttcgttatgatcgagttgattcctgccatagatataatgaacggtcgatgtgtccggttgtcgcgaggggattactcttgtcgaaaggtatatgatgaaaatccgttggaagtggcgaaagcgtttcaagacaatggattgaacaggctacatttggtcgatttggacggtgcgaaagccgatcatgtcgtaaattataggacgcttgaacaaatagctactcatacgactctttccgtcgattttggcggaggaataaaaagtgacgaagacttgcgtatcgcatttgagtgcggcgccgatatggtgacgggaggaagtatcgctgtgaagaatcgtagtttgttcctccaatggctcgatcggtatggcaaagagcatataattttgggtgcagatacccgagacgggaaaatatcaataaacgggtggctcgaagaatcggagtgggaattgattccgtatgtccgcgaatatgctcaggcgggtgtttataaagtaataacgacagatataagccgagatggtatgttggagggctgtgccgtgaatttgtatgaatccatgctgtcggagattcccgaaatttacctaattgcgagcgggggagtcgcttcgtggaacgacatagagtcgttgcaatccataggtgttcctgccgtaatattgggaaaatcgatttacgaggggaaaatattattgtcggaaatatcccggtttgtcgctaaaaatcaaagttatgttggctaaacgtattataccgtgtctcgacgtgaaagacggaaagactgtgaagggaacgaagtttgtggatttcaaagaggccggcgacccggttttattgggcgaaatatacagtaaagagggagccgatgaacttgtttacctcgatataactgcgtcgagcgagggtcgtagcacgttcaccgatttggtgaaacgggtggcttcccgtatcgacataccttttactgtcggaggcggtgtcaactctttgcaagatatagaccgtttattgaatgtaggggcggataaagtgtcgttgaattcttcggctctgaaaaatccgcaaattatagacgatgtggcaaaaaaattcggttcacaagtttgtgttatcgcaatagatgctaactttgaaaatggaaactgggtttgttattcgaatggtggaaaagtcgctacccaacgaacgctttttgaatgggctttggaagcagctgaaaggggagcgggtgaggtactctttacaagcatgactcatgatggcactcgaagcggatatgcccatgaagcgttattggaacttcaccgactattacctatcccaatcatagcttcgggaggagcgggtacgaaggcgcattttaaagatgcgtttctccgtggcaaggccgatgccgcattggctgcgggcgtatttcattttggcgagataacgattcctgagttgaaaaaatatttatcggaaagtggtattcctgtgaggaggtagatttatggaaaaagaaacgattcagttggatttcgaaaaaatgggtgggcttgttccagccgtcgttcaagacgatgttactcaaaaagtacttatggtagggtttatgaatgaagcggcatttcataaaaccttagatacgaatcgagtgacatttttcagtcggacgaaaggtcgattgtggatcaaaggagaacaaagcggaaatttcttagaggtgaaatccattctaccggactgtgataacgatacgcttttgattaaagcaactccgtgtggccctgtatgtcataccgggacggatacttgttttggagaaaaaaatgaagatgcgctttcattcatcgggtatttgcaagatttcatagaacggagaaaacaagagatgccccaaggctcatataccacctcgctttttcagtcggggataaaccgtatggcacagaaagtgggagaggaggctgtggagacaatcatcgaagctacgaatgggaccgatgaccgtcttatttatgaagcctcggatttgttgtaccatttgatcgtgttgcttacttcgaaagggcatcgcatagaagatttagttcgagaattacagaaaagacatcaataaaaagctatggaaaagaagttgcttgtcaaatataccgatgtgcagatttgccgggaggaactgactatattgaaacatatcaattttgagttatacagcggtgaatttgtctatttcatcggacgtgtgggtagtggaaaaagtagtctgctgaaaacgatgtatgccgatttgcctatttatgaaggagaggcaattgtgcttgatttcgatgttcgtcacctcaaaaataaagagatacccaatttgagacgaaaactgggtatcgtgtttcaagattttcagttattgaccgatcgttcggtatacgagaaccttgcttttgttttgagggctaccggttggaaagatagagaggagatagacacccgtgtgtcggaagttttggatcaagtgggcatgcgcaaaaaatcttacaaaatgcctcatgagctatcggggggtgaacagcagcgaatcgtcatagccagagctttattgaattcgcctaaaatcatcttggccgatgagcctaccggaaatctcgatcctcaaaccgggcaacaaatcgtgtcgttacttcatcacatctgcgaaacaggaaccgccgttatcatgacgactcacaatttgaatttggtagaggaattcccgggaagaatcttgaaatgcgaagataaaagtttggtagaagtttaatggcgaatagttgataatcccgcaaaaaagacatatttttgcgaagaaataagaaccgttttgttatattaaaaacaagtaaataaaaaatgaaagtactcaaatttggtggaacttccgtcggcagtgctcaatgcatgaaagatgttgccaaattaatttgtgatgggaatcggaaaatcgtagtgttatcggctatggccggaacaacgaataccttagtggaaatatctgattatttgtataagaaaaatacagatggcgctagggaaacgatcggaaatctcgaaaggaaatataataaagtcatagacgaattgtatagtaccgacgagtataagcaaaagacactcgaagtaattaaagggtgtttcgaccatattcgttcctttacaaaagatttgttcactttatttgaggaaaaagttattttggctcagggcgagttgatgtcgactgcgatgatgaataactatttattggagcaaggagtgaaatcggttattatccctgctcttgattatatgcgcacagacaagaattcggagcctgacaaccaatttattaaaaataaattgctttcattgcttcaagaaagtccagatgccgaaatttacattactcagggatatatatgcaggaatgcttatggagaaatagataaccttcaaagaggaggtagcgattattcagcgtcgttgataggtgcggcaatcaattcagaagagatacaaatatggaccgatatcgatggcatgcacaataacgaccctcggtttgtagagaacacgaagcctgttcgtttcctgcaatttgaggaggccgcagaattggcctacttcggtgcgaagatattgcatcctacatgtgtattgccggccaagttgaataatattccggtgagacttctcaatacgatgcagcccgaggctccgggtactctgatttacgatcattcatcagatgggcaaattaaagcaattgccgcgaaggagaatattacagccataaaaataaaatcggggagaatgttattggcgtatggtttcttgcggaaggtattcgaaatatttgaaagttatcagacttctatcgatatggtgacgacatcggaggtgggagtttctcttacgatagacaacaccaaacacctgcaagaaattctcgacgatttgcgtaaattcggaaccgtgactgtcgatgaagatatggtgatcatttgcgttgtcggggatttggaatggaataatgtcggatttgagtccgaagctgttcaagccatgaaagatattcccgtgcgaatgatatcttatggaggaagtaactacaatatttcatttttggttcgccgggaagataaggtaaaggctcttcggtctttaagtcattatctttttgagaataaataatatattgtcatgtagaaatatctctacatgacatttaaatttttgtatgtataatgtttcccatcagccatttcaatataacgaggactcctttttattattatgataaaacattgctgagtaacacattagcaaaactgattcgcttggcaggagaacggaattatcatgttcattatgctgtaaaagccaatgctaatccagaaatattgaaacttatcgcggcttcgggaataggagccgattgtgtgagcggaggggaaataaaagctgctttggaggctgggtttcctgcaaaaaaaattgtatttgccggggttggaaaggccgactgggaaatagaatatgcccttgaaaagaagatattttgctttaatgtggaatcggcagaggagttgtcggttatagaagaacttgccaagaaaaaggagaatatagcttcgattgcattgcgtattaatccgaatatcgatgctcatactcatgagtatattacgacaggacttagtgaaaataaattcggtattcctatcgaaatgttggattcgatattttcgcaaatacaacgttctccgcatgttcagctcgtgggatttcattttcacatagggtctcagatattgaatttagaaacatttcacgttctttgcgagcgaatcaatcaactacaagacgatttgtcgaagcgcaatattcaagtaaaacatattaatgtaggtggtggattgggagtcgattacgaaaatcccgataaaaatcctattcccgatttcggtcgttatttcgatatttttcagcataatctgaatttgagagggggccaacagttgcatttcgagttgggacgttctatcgtttgtcaatgcggatcgttgataaccagagtactatatgtcaagaagggtatcgaaaaacagtttgttatcgtagatgccggtatgaccgatttgattcgtccggcactttatcaggcacatcattgtatcgagaatattacttcggatatggagaagtgtcgatatgatgtcgttggacctatttgtgaatcttcggattgtttcgggaaagatgtaatgctcaacgagacaaaaagaggtgatttgattgccattcgatcggcaggcgcttatggggaggctatggcttcccagtataattgtaggacattacccggatatttgatagaataataaaattattaacaataatttttattttcgtatttagaaatatattatttttgccattacaaaattgtaatcattacaaataaagaaagatgaaagaatcggcacaaaatagattacgacgatataatataaagccttcggtgcaacgcatggccgtgttggattatttgatgacacaccatacacaccccacagccgatacgatattcaatgctttatatccatctattccgacgttgtccaaagctactgtttataacactttaaatttattgacagaacacggtgttatacagatgattacgatcgatgagaaaaatgcccgttttgatgcccgggagactccgcatttgcattttaaatgtgcttcttgcggagagatattcgattttgatttaccccctttacaaatagaatctttgaaggattatgatatttctgatattcaagtttattgtaagggaacgtgtccaacttgccagaagaaaactcaacattaaataactaactaaaataaccaatcatgaaaaaatttatttgtacagtatgcggttacgtatacgaaggtgatgaagctcctgaattttgcccgcaatgtaaacaacctcgttcaaaattcaaagaagttgttgaatcagatgaacttgattttgtaacggaacatcatatcggtgacggtgtagtagaggatgccgaagttatggagggtcttaaagctcatttcatgggtgaatgtaccgaagtaggtatgtaccttgccatgagccgtcaggcagatcgtgaaggttatcccgaagtggcagaagcctttaaacgttatgcttgggaagaggctgaacatgcatctaagtttgcagaacttttgggagaaatcgtttggaatacagagaaaaatctaaaagctcgtatggaagctgaaagtggagcttgtgcagacaaaatgcgtattgcaaaacgtgccaaagaacttggctatgatgctatacatgacactgtacatgaaatggctaaggacgaagctcgccacggtaaaggcttcgaaggtttatacaatcgttatttcaagaaataaaattgtatttatatttgtaagaggggtagctcatcttgtgagctaccccctttttatctattgcccattattgtaaaaatcgttatctttgcgcacattatcagattaatttcaatgaaaaatatacgcaatttttgtattattgcacatatagaccacggaaaaagtaccttggccgatcgcttgttggagtataccaaaaccattgcagacaaagatttacaggatcaagttctcgacaatatggatttggagcgagaacggggaattacgatcaaaagtcatgcaatacagatggaatatatttacaagggtgagaagtatattctgaatcttatagacactccggggcacgtggatttctcttatgaagtttctcggtctattgccgcatgtgaaggtgcattgcttatcgtcgatgcctctcagggaatacaagcacagactatttccaatctgtatatggcgattgaacatgacttggaaatcataccggttgtcaataaagtagatttggatagcgctcgtcccgatgaagtagaagatcaaattattgatttgctggggtgtaaacgggaagaaattatacgtgccagcggaaaaacaggacagggggtcgaagatattctttcggctattatagaacgggtaaatcctcctcagggagatgtggatgcaccgttacagtgccttattttcgattctgtatttaactcatttagaggaattatcgcttatttcaaaatttgtaacggacgaataaaaaccggcgataaggtaaaattcgttgcgaccggaaaagagtatgaggccgatgagataggtgttttgaaattggatatggttcctcgaaaagagttgtcggccggcgatgtaggatacattatttccggaataaaaacgtccagagaggtgaaagtgggagatacgattacccatatagagcgaccgtgttcttcggcaatcgatggattcgaagaagttaagcctatggtctttgccggagtgtatcccatcgaaacagaagattttgagaacctgagagcttcattggaaaagctgcaattaaacgatgcatccttgacttttcaacctgaatcatctgcggctttgggctttggtttccgatgtggctttttggggctgctccatatggaaattattcaggaaagattggatagagaattcaatatggacgttattactacggttccgaatgtttcttataaggtttacgataagaaaggtgcaatggtggaggttcataatccttctggattgccggatcctacgttgatagatcacatcgaagaaccttatatacgggcatcggtcattacttcgaccgactacatcggacctattatgactttgtgtctggggaagcgtggagagctggtcaagcaggaatatatatcggggaatagagtagagattatctacgatatgccgttaggagaaattgtcattgatttctatgataaacttaaaagtatatcgaaagggtatgcttctttcgattatcatattcatgatttcagggagtctaaattggtcaaactcgatattcttttaaacggggagtcggtggatgctttgtcgacgttgacgcacgtagacaatgcggtaacttttggacgaagaatgtgtgaaaagttgaaagagcttattcctcgccagcaattcgagattgctattcaggccgcaatcggggctaaaattatagccagagaaacgatcaaaccagtgcgtaaagatgttacggcaaaatgttatggcggtgatattagccggaaacgaaaactgttggaaaaacagaaaaaagggaaaaagcgtatgaaacaaatcggttcggtagaagtgcctcaaaaagcatttctagcggtattgaaactcgattagggtaattcggattctttttttcgtcattggaaaaccgtaaaaggctttctttgtttaaattacaaatacggaatgttatatggatagcttatatgccataaaaaagtcgattaaaaattatgccagtggaggtaatgttttgatagtggcgacattgttggcttttatcatcgctaattctccgattgccgatatgtatttttcttggtgggcacaacctatatctttacagttgggggatttcaacttatttagccataatgggcatcctatgaccgtaatggaatttatcaacgatgcattgatggcgattttctttttttctatcggactggaaataaagagagaggtattggttggagaattgacgtccataaagcaagcattattaccgatcgttgctgctattggtggaatggttattcctgttttattatttatgtatattggcagaggcagtgatttcctgagagggagtgccattcctatggcgacagatattgctttttcattgggcgttttggctatgttgggaaaaagagtccccatttccttgaaaatattcctaacaacattggcggtggtcgatgacataggaggtatattggttattgcgattttctattccagtcatatatcggttacttacttgttttatgctgccggcatatttttgattttatggttgggcggacgtgccggaatcaatagtaaaatgttctatttcatacttggcggtgtagtttggtttttattcttaaattcaggtattcaccctacgatagccggtgtattagtggctttctgtattcccgctaaaccggtattggcgactactcgttttatcagtacgattcgagatgaaatagctaatttcccgcaggaacagtttcatggggacagcgatagctcgataatgctctccaaagatcaaataaactgtttgaagagtatagaatctgcatccgataaagtgataagcccgttacaagaccttgaagatacattgcatcccgtgatcaactatcttattatccctttattcgcttttgccaatgcagggatcgttttgtcgggaatagaattgtcttcgttatttacgggtattagtttggctgtttttgtcgggttgttgttcggaaaatttgtgggtatctttttctcttcttggttaatcattaaactgaaaattgttccgatgccgacacactctacatggaagtcgttagcggcagtatctgtgttgggtggtattggttttacagtatctttgtttattgcaaatctttcttttggtaatatggggccagaaggaatagaattgttggagcatgcgaaactcggtattgtaatggggtctctcgtatccggtattttaggatatatcttactcaacctgtttttaccgaagcaacaagaagtcgagtagggcgcttattcaaattttatagatttggccgggcgaataagcgcaaccaaataggaaggtgcgatcaacatcaaaaccgatacaagcatgcagccgatgttcaaccataaaacgtaccaaaaatttatttcgataggaacataaggtacgtagtatgcttcgggattgagtgttacaatgtgaaagtgtcgttgaatcaggcataagacgacaccaataatatttccccatatcatacctttcccgacaaggaaaaccgatacgtataaaaatattttccgaatagaggtattgttcgctcctaatgctttcaatatgccaatcatattcgctcgttccaatataataatgagcaatcctgaaatcatggtaaagccagatacggcagccatgagaataagtatgatccagacgttcatatcgagtaaatcgagccagccgaaaaagaccggattcaatgtgcgaatggattgaggataataatgtgttccataatcatcgggacggtctattaattgtgtatatagttcatatgctatgtcgtcggctctatcgaaatcttttaccattagttctatttcgctatactggtctggattccaatcgttaaggcgttgaatatgtcttacatctccgataatcaacagtttgtcataatccgaaaaatcggtctgatatattcctgaaatagaaaatcgtcgggctcttacttgctcttggacaaagtagcagtatattttatccccgatatgcaggtccaatttatctgctatggttttggaaacgaggacttcgttggatattattgagtcttgaattttgggtaaacagccatcgaccagatatttcttgaaaaaagaccagttatagtcgggggtaactcctttcagaaccgttcccataaaatcggtatcggtctttatcatacccagttttgtcccgatagggtctatttttgtgatgccatcgcattctgacaatatttcacgcagactatcggtatattgaattggctgcttttcgtaagtcatgttattatcgaatgacgttatctgaatgtgagcgccgaatcctacaactttgcttcggatttcttttttgaaaccgatgacaatcgcaaccgacagtatcattatggctaatcctagcgcaacaccggccacagctacacgtacggccggtggggtagctttttttcgatgctgtttgtcgaaatgtatgcgattagcaatatataatttccaattattcattgatggtgcggccggggtatgtttctaatgctttttgtaaaacgattagagcttttgatagttcttctttttccagtacataggctaaacgaacttcgtttttccccaatccgggcgtggtatagaaccctgaggcgggagccataaatatggtttgtccttcgtactcgaattcagataaacaccattcacagaatttatcggcattatctaccggtaatcgagccacggtgtagaatgctcccatagggataggggagtaacaccccggaattcggtttaaaccgtcaattaggtgtttacgccgttctacatactcgttataggtagaaagcatataactttcgggagcatcgatagaggcttcggctacgatttgtcctaaaagcggtggactgagtctggcctgacagaatttcataacactcttttttaattctttatgtcgagtgatcagggctcctatgcgaattccgcattcgctgtatctttttgaaacagaatctattaacactacctgttcttcaatcccttctaagtggaaagccgatatatagggcgctcctgtatagcaaaattcccgatatacttcgtcggagaataggaacaaatcatatttctttaccagatcccgtatttggttcatttctctttgggtgtataagtaccctgtgggattattgggattacagattagtatagccttagtttttggcgtaattagagattcgaatttttcaatagaaggtaatgcgaagccttcttcaatagaagagggtaaagttttgattactgctccggccgagatagcgaatgccatgtagttggcgtatgccggttctggaacaataatttcatcgccggggtccagacaagccatgaatgagaataatacagcctcagagcctcctgtggtgatgattatatcatcggctgtcacatgaatatggaatttgtcataatattggactaacttttcccgaaggctttttatgccctcactgggactgtattccagtattcggcgatgcatgtgccgtaacgcatccaaccctatttgaggagtcggcaaatcgggttgcccgatgtttagatgaaaaacttttattcctttttctttggctttgttggcgagaggaacgagttttcgtataggagaggccggcatgacttcgcctctatgagagattgtgggcatactttttaatttaatatagactaacctatgaaatatgcgatatcaaacggggtgtctattttttatttttaaaatacaaagataagaattttacttttttctttccttatggagatagtagaatatgaagagagaagtcgtaaaatagaataaataatgctatatttgcatacaaatatagaaatacagcagttttatgaacgatttgaagcatctctttttgcttattgtttctcccgggaagacatggcaaaaaatggataaagtgccgtatgcgacacaaatatttttgaatcaattcctatatccgcttatgggaataactgcgatagtatcctttttaggacatttttttaacgatgcttctttaccaagagctttgcagttggcgatcgtggaatttgtgaaattttttgccggcttctatgctcttgtatatgtaatgaaaattttttcgacttacatgttggaggttttgcaacctgagtctcgtataaaacgttttgtcggatacacattggcattgtatatgttgtttgatatttccatttttgttatccgattgtttatagaacttccgtctatagttgattttttaccccttctgttagcctatgtgatttggaacagtcaaaggtatatggaaattccagatcaaaaaaatattttatacgtagtggctacaaccatattatttcttgttatacctttgtccattcagaaactgttgtactttttgatgcccggattgatttaattagtatagaaatgaagttaccacaaataaatataaaaaataagagggcgagtttcgattatgaattgctcgatacctttcatgcgggaattgtgctgtctggaactgaaataaagtcaattcggttgggtaaggccgggctgacggactctttttgttacatcaataatggagaaatctggataaaaaatatgtatatagccgagtatttctatggttcttataacaatcattcttctcggcgagacagaaagcttttattaactcataaagaaattcagaaaatagagagggctgccaaagaatcggggttttcaataataccgacacgagtttttattaatgagaagggattggcaaaagtggttattgctatcgctaagggtaaaaaagaatacgataagcgagattcgattaaggagagagaggataaacggcaaatggatcgaatgtttaagcgttagtcgctctcttgcagataattaatactttgttgtcattcgatagggttgtagcgaaaagatataaatcacctccgtccttggtctttaactttttctgtaattctgctgtggttaggggaaaattacgtgtcgataggtttgtctgaggatatttcgttttgatatcttttatatttttcgaattgaatgtaactgtttctatgatctcaaatttccgtcccggaaaattagagatgtagttgtccgaagtatacaaatggctattggcttgtaacttttctatgtcatattcaatagcgatagatttataagcccctgctttgagtatagatgtattgggctcatagaggtatttctttatacttttacaaaaagtcgagtagggaaggcctttttcttgttttattccaaacgtgaaatccgatatattgtcaaaagaattgatttgtatacaatgaataatcgtatctcgatcactcgatttttccgactcggtatcgatgactaataataattccttacattcgttttttacggatacaacatgtacctctgaaatatctggtaagagagaaagggtagctgttatatcgaccataggagatacctttattatgatacgtttcccgcattggaaaagtataggcataagctctattacattaggctcacattcgtcgatagcgaatatccgtttattgcaggagcctcttctcgcaggatcgatatatatattttgaaaatgtcgatcgttattttgtagaaagtttatgcagtcgtcgtgcgtaacggttatgttatcggtacataagtttttaaagttttgttttgccgctcggcaatattcggctaattgctccacataaactacgtgatctgatttttgagaaaaaaagaaactgtctacacctaagcctccggtcaaatcgacagtatctcccggaattatcaaattttgcttatatcgtgcggtcagttccgaggaacattgttctgtcgatagaatagatgggaaaacaatattcatgtttgaagcccatgtaggtagcttgtcgcgtatctttttacgggcttcgatttgttgaatggcccaagctacatcaaaatcagcttggatatttttcaaccgtaacttattagtatcaaaatcagaatattctaaaataaaattctgaatagatttttggtacatcatatttacaaatatacaaattatatatcgaattaaagagtttgtggaggatatattattatttgaattaaatttgtcctataatttgtattatgttaaataaaatattgggaatattaatttaataaaatgaaagacaacgatttatatatttacaaaaaatccgatccacatgaaatgtgaatcggatttccctatgaattatctatgcaaggcgaaaattattgaccttcaatagcttttaatttttctgcatcgttcaaattataatagatattacgtaatgcatatttatagtcgggttcgtccggtttcaattcatatgctttttcgtaataaggacgagatttctcaaacaaaggaagaacttctttttctcttgcttctgtatatttcgcattgtctgttatcgtgctgatttcattatttttttgaacagccagattaaaataaacacgtcctatgctgcccaaagcatcggcataagatggatttatggagattgccttctcaaaacattctatggattgatcgtactttttctgggattcatacagatttccttttacattccaatattctgcattgttaggttcgtcggccaatacggattcgagtgtagctatggcttcatcgtatttcccgctaaatatatagagattgatcaacttcaatgtgtaggtattctctttctgcattttggtatttccgttctcgtctttcacttcaaccatttcgtttttgaatagtttttcaccttcttgaagtgttttaatcagattggccgtatcttgtgtcatctcatattcatatacgagatatttatagatatcgttttgattgtatccatttccttttgcttcgttcaacgcttttatggctaatgtggtatcattggtttgaagtgctgccaatgccctgttaaattctaaaatagccagagttgaatctgccggaaggccttctttttcgcctttcatgatagacatcttaggaatatttagatagataccccacacatcgtatgcttttttatactctttttgtgtgaaataataaactcctgcattggcatatccatcgatgttttgttttaatgtttttcttatgtctttgacatatcggggtttgattttccctttttcgttgggcaaagtgtctaatgcgatggcttgaagaaaatattcataactttttactaacgcatcatacattggtccgtcaccgtctttcaatgtcattcccaatgttttctgaacattgtctttttcaaaataggagttttctacaaatcctgcaacataccaagttttagcatcgtccttagtttctggatttgttagtgctcctttaatattatcacgggcttcctgaaagttgggtttttccattttagcttcgctaaatgccctatttacagctttcttttgaccaaatgcgcaaatgatagaaagcagtaatactaccgttaatgttgtttttttcattgcgtttttattttaaaaattaattatatctaaatttattcggcaacttcggttacgttatcgtcttgtaagttttcatcgacactttctgataaaactttgcaaaccgatgctatttcatcgttacgtttttccaagtttattaatcttacaccctgtgttgcccgtcccatgactcgtacgtcggctactttcattcgtagagtaatgcccgatttgtttatgattaccaaatcattttcatctgttacgcatttaatcgctaccaaacagcctgtcttatcggtaatattcagcgtttttacgcctttccctcctcggtttgttattcgataatcttctataagagagcgttttccatagccttgctccgagacaaccatgatggtttctttttcgggatcgtttacacaaatcattcctaccacttcatcgccattatcgtcaagggtcataccctttacgcctgttgcattacgtcccatttcgcgtactgcactttcatggaatcgaatagcgcgaccgtttttgttggcgataattatttgactgtctcccgtggtgagacgcacttgtataacttgatcgtcttcccgaatcgtaatcgcgtttactccgttctgtcgaggacgcgaataggcttcgagttttgtcttttttattacacctttacgcgtacagaatagtaagttatgagacatattgtattcggggtcttgtaatttttttacccgaatgaatgcgtttaccttgtcgtcggactctatattgagcatattttgaatggcccgtccctttgagtttttagcaccttcggggatttcgtagactttcagccaatagcatttacccttttgggtaaagaacaacatataattgtgcattgatgccggatagatatactcgatgaaatcttcttcacgagtattgcttccttttgctccgactcctcctcgattttgagcacggaattcggacagaggggtccgtttgatatatcccatgtgcgatatggtgataatcatttcgtcgtcggcatagaagtcctcagcattgaactcttccgaggaataaataatttctgttttacgttcgtcgccatacttctcttttatttcgagaagctcgtcttttaccactttcatacaaacagactcatcggcgagaatttctttgtaataggcaatcattttttccacctcggcgtattcgttcctcagtttgtcctgatccaaaccggtcaactgtccaagacgcatatctacgatggcctgagcttgtttttcgctcaacgagaatcgctccattaaacgtgtcttggcttcttcacgagtccgtgatgaccgaatcagtttaacgacttcgtctatgtgatcggatgcaataataagtccttcaagaatatgcgccctttcttcggctttcgccagatcgaaacgagtgcggcgaataacgacttcgtggcgatgatccacaaacgcctctaacagttgttttagatttagtgtttgaggacgcccgtttaccaaagcaatattattgacactgaaagaggattgcaagtcggtcattttgaataatttatttaaaataacgcttgcattggcatctcgttttacttcgataacgattctcattccggctcggtcggattcatcgttgatgttggaaataccttctaaccgtttttcttccaccaaatcggcgattttcttaatcaattccgacttattgacggcatatggtatttcagatacgacgatggtttctcgccctgtggtgctgtctacttcaatctcggcttttgcccgaatgacaattctgccccggcctgtttcgaaagcatcttttacccctgcaaaaccataaataatacctcctgtggggaagtcgggagccttgatatattgcattaggtcttctactgtcaattctctgtcgtcgattagggcaacagaagcatctatacattccgacaggttatgagggggcatattcgttgccatacccacagcaatacccgaagctccattgactagtaagttgggaattcgggtcggcaaaacagttggctcttctaatgtgttatcgaagtttggagtaaaatcgaccgtatctttttcaatatctcgaagcatctcttctgcgatacgagaaaggcgagcttcggtataacgcatggcagcagggctatcaccatcgacagacccgaagttgccttgcccatcgaccaaaggataacgtaaagaccagggttgcgccatacgcaccaatgcaaaatataccgacgaatcgccatgcgggtgatatttacccagcacatctcccacgattcttgctgatttcttataaggcttatccgatgtgttacccaatttgtccataccgaacagaactctgcggtgtaccggtttaaaaccatctcttacatcgggtaaggcacgagctacaatcaccgacatagaataatcgatgtaggccgattgcatctcttgtttgatgtctatttttaaaattctatcttgatcaatcatttattttgatgaaaattggttatacaaattatgctgtttagcgtacaaagataaccattttttgaaaaatcgagataccaaattcaagaaataatcttttgtgaataggaattttcggcatattatttgttatatgtaataaactaataaatacccgccattattcggcttaaaggtggtatatttgctaaatcaataaaaggagacagattgtttatggaaagaaacttctcacaacatgttaaggaaattctcggttatagccgggaagaggctgaacgccttcaaaattccaacattgttcccgagcatttattgttaggaattatacgtgacggcgcaaatcgtgctgtcgatgtattggtcgggctcggagcttccctccgaacactgaaaagttcattggaaaatgaactgtccgcttccaataatcacatggaacaaacgaatgaattgactattagtaaaagcacagatagagttttaaagatgagtatgcttgaagctcgatttatgaaaagttcggagaccgacaccgaacatttattgttggctatattgaaagagccagactcttctgctgcaaaaattttaaacacgaatgacataacttatgacgaagtggcagcttttttaaaaggtaatgagaagccggatttcccttcgccgagcatgggcgccggatttacggacgatgatgacgacgaattggaggaagaccgaaattatcggagggaacagcaaagcggaaatagtacgactgctcagcgtagtaataatgaaactcccgtattggacaactttgggaccgatatgacaaaggctgccgaagaaggtcggctcgaccctgttgtcggacgtgaaaacgaaattgaacgattggcacaagtattgagccgaagaaagaagaataatccggttcttataggggaacccggtgtaggaaaatctgcgatagtagaaggtcttgctttgagaatcgtgcaacgtaaagtgtcgagggtgctattcgataagagacttgtctctctcgacatggcctcgattgtagcaggaacaaaatatagaggacaattcgaggagcgtataaaagcaattctaaatgagttgtcgaagaatccgaatattattttatttatcgacgagattcatactattgtcggtgcaggtggagccacagggtctcttgatgctgccaatatgttaaaaccggctctttcgcggggagagattcagtgtatcggtgctacaacactcgatgaatataggaaaaatatagaaaaagatggtgctttggaacgccgtttccaaaagattatggtcgagcctacaactcccgaggagactctgcaaatcctcaataatataaaaggtaggtacgaggatcaccataatgtcacctataccgatgatgcattggaggcgtgtgtcaaattgacagaccgttacataagtgaccgtaatttcccggacaaagccattgatgcattggacgaagctggggcgcgagtgcatgtttctaatattattgtccccaaagaaatcgaaagtttggaggctcaaatagagacttgccgggaagataaaataaatgctgttaaatcccaaaactatgagcttgcggcgagttttagagacaaggaaaaagaattgcaactttcccttgaatcggcgaaagcaaactgggaaaggcagatgcaacaacatagagagattgtcaatgaggaaaaggttgccgaagttgtcgctatgatgactggtgtcccggtgcagcgtatcgcacaagctgagggaaataaacttttagctatgtcgggagagttgaagcgcgaaattattgggcaagatgatgctgtcgataaaattgtaaaagcgatacagcgaaatcgtgtaggattaaaggatccggggaaacctatcggcactttcatgtttttgggccctacgggtgtgggtaagactcatttagcaaagaaattggccgaatacttatttgactcgaaagatgctcttatccgaatagacatgagtgaatatatggagaaatttactgtgtccagactggtcggagcccctccgggatatgtgggatatgaggaaggaggacagttaacggagaaagtgagacgtaaaccctattcggttgtgctgctcgatgaaatagaaaaggctcaccccgatgtctttaatctattgttgcaagtcttagacgaagggcgcctaaccgatagcttggggcgcagaatcgattttaagaatacgattctgattatgacatctaatatcggtacgcgtcaattaaaggattttggacaaggagtaggattctcgactaatactgtttcggaaaaggattattcgaggggtgttatacaaaaggcgttgaatagagctttctctcccgaatttttaaatcgtatcgacgatattgtaatgttcgaccaattggataaagaatctattttcaaaattatcgatttggaattaagcggattttacaaacgggtggaaacactgggttatcatctgactattactgacgatgccaaaaactttattgccgaaaaggggtatgatattcagtttggagcccgacctctaaaacgggccatacagaaatacctcgaagataaacttgccgaaatgattattcgggcgacggttcaagaaggtgatactattgtcgttgatttcgataaggagaatcagaagatcgtgtcttcgattcataattcccaaacgaaatgacaaataatagttgaataagtcaaaatgtcagactctttgagtctggcattttttttgaaaaatcatagtcagaaatttaaatgataaaaatatacaattatgcaaaaaggtacaattggggttacaaccgacaatatcttccccgtcattaaaaaatttttgtatagcgaccatgaaatatttttaagggagctcgtttctaatgctgtggatgccactcagaaattgaagacattatcttcttttggcgatttcaaaggtgagttaggcacgatgaatgtcacagtgtcgattgataaaaataaggggacgttgactatatcggatcgcggtataggaatgacagccgaagagatagacaaatatatcaatcaaattgctttttcgggggccgaagagttcttggaaaaatataaaaatgacgcgaatgccattatcgggcatttcgggctgggattttattcttctttcatggtttccaaaaaagtagaaatacgtacattatcctataaagaaggagcccaagcagtcatgtggagctgcgatggttctccggcttacgagatgaccgatattgaaaagagcgaacggggaacagatattattttatatgtcgatgatgacaataaggaattccttgaagaacaacgtatcgagaccctgttgaaaaaatattgtcgtttcttgcctgttcccgttgtgtttggaaaagaacaagaatggaaagacgggaaatatgtcgatacagacaaggatagggtcattaatgatatggagcctgcatggactcggaagccgacagatttgaccgatgaagattacaggaaattctatgccgatctttatccgggaatagatgaacctctgttttggattcatttgaatatcgactatccgtttaagttgacggggattctttatttcccgaaaatcaaaaataatatcgatatcaatcgatacaagatacaattatattgcaaccaagtattcgttaccgattcggtagagggtatcgtccctgatttcctaatgcttttacagggtgtgattgattcacccgatattccgttgaatgtttcgcgttcatatctgcaaagcgattctaatgtaaagaaaatatcggggtatatcactaaaaaggtttcggaacgtctgcaagagatattcaacagcgatcacaaacagttcgaggagaaatgggacgatttgaaaatcttcatcgaatatggtatgctgtctgatgagaaattctacgagcgtgctcagaaattcgtattattgaaagatacggaggataaatattatacgctcgatgaatataaaaaactgatagagggtaaccaaaccgataaagacggacaactcgtttatctgtatgccactgataaggaagcacaatacagttatatcgatacggctgtatcaagaggctacgatgtgctattgatgaacggacagttggaccctcatttcatcggtatgttggagcagaaattggagaaaagccgtttcgtgcgcgtggatagcgatctgatcgataaactaatcaagaaatcggatacaacttcaaatacagctctcgatgagcaacagcgcgatatgatgacttctgttttcaaatcgcagatccctgctatggagaaaagcgatttcttggttatgttcgagcccgtaggtgcgactgctcaacctatcgttattacgcaaaatgaatttatgcgtcgtatgaaagatatggctgctatacaatcaggaatggctttctatggggagcttcccgatagctataacctcatagtgaacacagatcaccctctttcgcaaaaggttattgctgataccgaaagtgcttgtaagagtgaattaactcctatattggacgagctgaaaactgtcaatgaagaaatcgaacggttacaagaggcaaaaaaagataaaaaggacgatgaaattcccgtagcagataaggaggctttgaagcatgctgaggaaaaggcaaaagaattgagagcaaaggaatcggatatattgaagacttatgccgaccggacacctttggttcgtcagttggtcgacttggctctgctttccaataatatgttgaagggagaggctctgagtaaatttatcaaacggtcggttgaaatgctctaacaagctatacagatataaagtaacgctttaatatctgttcgcaaatataatattaaactgatactttaatagcgaatgtggattgtattagatggcacaatccacattcgctatttttatactattgataataaattaattacaaatcaaacctccgataagctcttttacggatgcaatgttgttcctatcgagatattcgtctattccgtccgctattttttcagttatttgaggatctatgaagttagctgttccgacctctatggcagatgcaccggccaatataaattcaacggcatcggtggcgttcatgattcctcccaaccctacaatagggatttttacggcatggtaagtttgccaaaccatacgcaatgcgatgggcttaacacatgcaccggataatccccctgtaattgtagagagtaccggtctgcgacgatttgaatcaatagccatacccaacagagtattgatcagggacacagcatcggcgccttcggcctcgactgctcgggctatctcggtaatatcggtaacgtttggcgaaagtttgacaatcaaagttttaggataaactgcacgcacagcttttaccacagcggcagcactttggcagcttgtcccgaaagccattccaccctcttttacattcgggcaagagatatttaactcaattcccggaatcttgtccaatgcagcgattttctctgccgtgacggcgtagtcttctattgaggatcccgatacatttaccaagaaatgggtatcgatatcttttatgcgaggatatatattttcgatgaagtaattgacacctttgttttgtaatcctactgcgttgagcattcccgaaggcgtttcggccatacgtggatacgggttgccttctctatgatgcagcgtcgttccttttacaatgactcctcccagccgagataaatcgacgaaatcggcaaattcttcgccgtagccgaatgttcccgatgccgtcattacgggattcttcaaaagcaatccacctatatttacttttaaatctgccattttagtttttctatattaaagataggaccttccttacatacacaagtattgccttcgatcgtatcttctacgcaacagagacatgcgcctacgccacaggccatcatattttcgagagatacttcacaggatatgtttcgttcatgagcaaatcgggcgacggctaccatcatgggtttcgggccgcaaacatacagcttatcgagtttactatttaacaaggagtgctgagtcacgaatcctttttcgcccaaagagccgtcttctgtggaaatatatacatctccaaactgccgaaacatttcatattgcagtatatccttgtctgaacggaatcctaacaaaaatttgggggtataattccgttcttttaagtatttgccccaatacagcatcggggctattccaacgcctcctccgataagcaatatattcgaatctgtttcatcgggtaaactgaatgtattacccaatggtaaaaccaaattaatactatctccttgtttcaaatcgcataaagtccgagttccttcaccggcttttcttatcaatagccatagctcattgcgagttgaatcgacgaaattgatagaaatcggacgccttaaaaatgtaccgggagaccggtctacacgaacctcgacaaactgcccgggtaacatatcgggcaacggttcattattatcgggtttcaatttcaaaagagcataattatcgtgcagttttgtgttttcaacaacccgaaagtcaagaatatattttttcataaaattattttagctgaacaaagatagtataaacccaaaagcgaagcaaaagtttatcggattatgcaatcgttttatttctcctttaaaagataaagacgagttattcattgtccggggaaaatgtctcgaacgtattatcggagtagaaaatcatgattttagttacttttttattttttacgacctgttccgatggctcgaaaaatggtgcttttaagtttgttacttcttcattttcaagtttatggtcctgtttttgatgaatattagagtcattttccctcgaatattttgaaggagctgtatattcgtccggttttatttcattctcctcgggaaataaagatgttgaaaattctttggagggtgaggtaatgttttcggccggaggtattgccgttgtcaaaatcatagggcctgttccatataacagccaatagatagataagtcgggataggcagaatgtatcttcccaatggtattgatactgatcttctgatttcgtccacccaaaatttgagacattgaagatctctgtatcttagttgcatcagcaaattgagtaacagatatacccttatactcgataaaacttttcattctttcggcaacaattagagcttcattttcttccatttttaggggtgtaaatagattcgtaataataaaattatagtttacaaatgtaacaagaataaataaaaaacgcaagtttgttttgtaaattatgtaatttacaaatgcaaataaaacaacatgaggtatacttcgtaaatagccttcattgtttaccaacaataatatttattaaaagtattattttacatttatatatataattatttagaaatcaatattttatttgttatatatacaaaacagcctgcgtatatcgttcgaaattcgaagttatacctcgaatatactttacattaaacatattaaaacgttggtttttaattatttgtattatatatattgtagatataataattgtttatgtatctctgtacttggtggatatgcaaatgtaatacccctaccctttatgagttacagatttttattttgtgtaattgcgttttgcgtgttacatttgtaaatagcggttgtaaattacaaatgtaaacagcaaactggtttataactcaacttcacgagattttattttccaagtacagatgtaaacttgttcaaaaatatgagaattatacgccccttaaatcctactcaaaatagatttatattattgattcaaaacatattacaactgtaaatagcataaaaaaggattcaaattttatactttgaacccttttctatctttcaaaatcgtaatatgtcgtttttcttatacctttaattccgcctttaaataacgagccgtaaaagtattctgtacacaaacttcttccggagtacccgttgttaaaacatatcctccatttttaccgccttccggtcccatatcgataatgtggtcggcacatttgattatatccagattgtgctcaatgactatcacggtatttcctttatctaccaatcggttcaacacagagagcaatactcgaatatcttcgaaatgtaatcctgtggtaggttcgtctagtatatagagagttttacctgtatctctttttgaaagttccgcagccagttttacccgttgactctctcctcctgataaagtcgtagacggctgccccagtttaatgtatccgagaccaacgtcctgtaaaactttaattttagaaataatagagggtatattttcaaaaaattccacggcttgattgatggtcatgtccaaaacatcggcaatagattttcctttaaatcttacttcaagggtttctctattgtatcgtttcccatgacaggcttcacaaggcacgagtacatcgggcaggaaattcatttcgatagtcttatatccatttcctccgcatacctcgcaacgtcctcccggaatattgaacgagaatctacccggtttataacctcgaattttggcttccggcaattcgacgaacacgttgcgtatatcggcaaaaacaccggtataagtggccggattcgaccgtggtgttcgacccagcggcgattggtcgaccgttacgattttatcgatgttttctaatccttctattttctcatagggtaacggattttgcaaagaacgataaaatttttgactaataataggttgcaaagtcccgttaatcaaacttgatttaccactccccgaaacacctgtgatacaaatgaattttcccagaggaaattcgacggtcacattttttaaattgtttccggtagctcctgatagtattatcttttttccgtttccagttctcctttggggggcaaattcgatttcttttttaccggtaaggtatcgagccgtaagagtgtcggttttcaacatttctttcggagttccggcgaaaacgatatttcctcccagccgtccagcccgaggccccaagtctacaatataatcggcttcgagcatcatttccttatcgtgctctactacaataatcgaattccccatatcccttaattcttttaaagactgaatcaaccgagtgttatcccgttgatgaagtcctatactgggttcatcgagaatataaaggacattaaccaattgagaccctatttgagttgctaatcttatccgttgactttctccacccgacaatgtggcagaagctctgttcagggataagtaatccaagcccacatcaacgaggaaatgcagtctgttacgtatttctttgagaatctcggccgcaattttacgttgctgaggagataaatattcctctacatgatttacccactcgtataattccgaaatatccatatcggctagatcggcaatattttttcctgcgattctgtaatgtaaagcctccttgttcaagcgatgtccttcgcatagcgggcatgtagctgtcgtgacgaattgtccagcccatttttgagcttgcgatgaagcgtcgctttgctgttgaatttctatatattttatcagaccatcgaacgataaaaaatagttcgaagttcccagcgattcatttttaatttgcaaacgctcgtctgttccgttcagtatatcgtccaacgcttcttccggaagatttttgataggggttttcaaactactgtcgtatttttcacaaatcgcggcgatttgccaaaatatcaatgaatttttatatttgccaagcggaacgattcctccttcatagatggatttttcgtcattcgggataattttgtttttgtcaattatattgacatatcccagccccttacatttcgggcaagcaccttgtggggaattgaatgaaaagctatgaggagccggttcactataagacaacccggtttgcgggtccatcaatgtccggctgtaatgtcttatttcttgtgtctctgcatcgagaaccatcagttggccatctccttgtttcatcgcagtcttgacactttcctgcaaacgccgttcatcgtctttatccacgattagtttatcgattaccagttcgatgctgtggtttttataacggtcgagtttcattccatgcgttatttcccgtagctctccgtcgattctgaccgtcaaataaccttttctccgaacttgctcgaacaaatctttataatgtcccttacggttacgaaccaatggagcgaggatataagttttcttattctggtataggtccattatcagagaaatgattttctcctcggtataacgaaccattttttcccccgataaataagagtatgcttcccctgcccttgcaaacagcaaccgaaaaaaatcgaatatctctgttgttgtccctacggtcgaacgagggtttttattcgtcgttttttgttctatggaaataacaggactcaatccggttattttatctacatctgggcgctccatacctccgagcatattccgtgcgtatgctgtaaaggtctcaatgtaacgcctttgcccttcggcaaaaatagtatcgaatgccaatgacgatttgccactgccacttaatcctgtaataacggtgagactgttccgcggaatattgacatctatatttttgagattatggacacgagccccatatacttcaatttgttcttctgctttcattttttgtcgatcacccactcttttttataagtagtaaatttacgtttcgtataatacaaatcgtctttcatcggtatttttatatagtaaacttttctagacttatccggtaagaaacgggagcgaagccacgggttggcttcttttaattgggcataagaaacgcccttagattgagcgaatacggctaggttgttaatcgtggtatctacttttatttccgagtatctgattggttgatagagttgtttggcttttagtttgtatccatattttgccggagaagaaaatatttctttcatggctaaaatgcgaaatacataacgagatgtttcttcatttaaccataaatcgaacgatcgatcggccagttgtttttccaattcggtcgatatacgtcccataccggcattataagatgctgcgacagtcgtccaactaccatatttttcataagcatctttcaaatatttgcaggctgcgcgagtagacttttctatatgatagcgttcgtctatatcgttatttacttctagtccatattctcttcccgtacgaggcataatttgccagataccaacggcttttgccggtgaaacggcttttggattcaaggtactttcaataacggccaaatataaaaaatcggtcgggactttctcttctttcaatataggttccaatatgggaaaatatcggttggctcgttttatggctaatgatgtagacgagtgcatataacatagcgtggtgagttccctgtcgaatcgttcatacatatccagacggtccagatctacaagctcatttgcgaatttcacttgtagtggaaattcgggaacgattacatcggaaaattcttttgtcgtatttgcataccctttaatgaacagcagtgtatacaaaaataacagtacaataaaaaaatacctatttgacgtcatttacttatatccattaatttttaggacgtaatatattgatgtgtccctttaatttcatctttttattatttgccccctttgcttctattacataataatatactcccgggtctacatatttgccacgatactttccgtcccagccttgatcggggctatcgaagtaaaacatctgaactccccatttattgaatatccaacatttaaaactaacgatcgatttataagctactttccattcgtcgttaactccggggcttgttcccggtgaaaaaatgtttggtgcttccaaacgaggttctccgatatttatggtgaatgtctcgctgtatgcctgacatgtagcggtactattgctggcgactaggcgaacataagtgacaccctcgtctctgaaagtgtaccataaggtttcatcgttataccgggcaattgtatttgaaaagtcctccttgtccgagaattcccattcgatatgagtaacagcatccgttacataagctttgaattcgatctcggccggtgcagaccctcccaaataatcggtgggatgtctatcgtcttcattcgtggcatcttcccgatatgtctgttctgccgtcgctgtcgcccctattgccgatgttatatattcctcggtcgatgccgtctgcgacagcccccaataattcaatatctgatctcctgttactgtaaaatcggtattacagagaggtgacggtacttggatagaagaagaaaagtcatacaccgtttctgtctggaatgtttgggtatatgccagagactctttatcccatgtcaaactcatataactaaccgttagctcacggcgtagcgatttaggggctccattgatcgagtagtaattaagctttttcccttccccatctagcattaatgtggtcatatcgcactgaccttcttcatttgatgtagaaacagcattaagaatcaaaggagattgggaataatcgattatccataaataataactctctccattttgttcaattatatatccacaatcggcttccgaaatattcaatgtagaaatgttcccgttttgtatagctccacttatcggggtagacgatgctgcaccgttttccctgaataggcgccaagaaatgggagaatcatcttcccccgaaaattcgatcgttgcgttatttagcgaatatatcacaaaaacaccacctgttaaaccggtactaatctctggcgtatggttataggcaggtcttccccctcccgatacggtaatttgttgagcatataactcaccgattgtaatgatgcacgcgaaaaatagcaggtatctacgcatatttatccaaataataatgaatgacaaagttacaatttttcaagtaatcgtgtttgtatcttgaatttaaaatttcccaataatctcgtttccgagagagaaatgataatatgatttccataatctcgatcgggtttgcaactaacgatatttttatatacttttgtttcttgtatatcaagtttgtatataaaagataacgatttgaaaatatgaaatatactcgaataaccatagctttattattttgttttgccttcacttttttgttgtctgctcagacagagaatttacaaacaaagattatagacgggaaagaattttatatttataaggttaaaccgtcggagggattttatatattatctcataaattcggtatttctcaggaggaaattattcgctataatcctgccgctaaaaatggcttaaaaaaaggacagctgctcatgattccgacaaataagggcgtgaataagccagattctgaaccggaaatcgaaagcacatttgaacatacaatcgtacggggagaatccctgtattctatttcaaagacttataaagtccctattcgaagcattattgcacttaatccgggttctgaacgtggaataaaagccggtgcgactttaaagattccacaacgttatcaaaagcctgagaaacaatctattcctcttgtacaaaaggacactcaaacagcaatgaataccgccgatagtgaagttttagaggattctttgaacgggacctcgaatgaatatgtctatcacacgattgtcgacggtgaaaccttattttctatatcgaaaagatatgatgttgacatagagattattttgaaacttaatcccggtatttcccctactcatatgaagaagggttccgtgatacgcataactcccgatacgaaagaattaaatgttacgatagagcccaaacagttatatacggaatataaagtaaggaaaaaggagactttatatagtatctcaaaaaagtttggaacgactgttgaagagataaagaaatgcaatccgaacataaaacaaataaagcaagacgatataataaatattcccgcaggaatagagtacaatacagttactgcggaaaatcctatcacgagtgcagaaatcaataatatatacaataagttatataaaagcgacaagaagggggtaatcaatgtcgcggttatacttccgtttatgttgcgacagtcgtctctcgatacgaaagccagtttatataccgagtattatcagggatttttaatggcggtagacagccttaaacgtcaaggagcctctatcaatgtatatgcgtatgattccgaagagtccgaaccaaccgttcgtcgtattctttcagatccgatattaaaagaaatggacttgattatcgctcctgaaaatgatagtcatataaaattaatcgctgatttcggactggccaacgatataaatgtcgttaatactttttcgcttaaaaacgaggaggtttcgcacaatgcaaaagtattccaaaccaatattccccattcctatttatatgcagaagctgcggacagatttatccgttatttggggaatcggaaagtcgtatttttatctcatacaccggaagaacccgacaaaagagattttatcggcggtctgaaagaagaattggatcgagctcatatcgcttatcacgagataaagttcggtaatgagttgaacctattagatcaagattctatattggcagatgcaagcgggattgtatttgtacctacctcggccaaaaagaaggttctttctttaattgtagctcctattgaatcgttgaaagaaaaaagagcagatttggatattgcacttttcggatatccggaatggctgacacaggttcctgaatatctgaacgaattttataaactaaatacttatttatattcccggttctatgccaatccgttcgaggaagatactaagacgtttcacaaacgattcctttattggtataataaggatatgataaatgccagccctcaatatgctttattaggattcgataccggaatatattttctttcggctatacgggaacatgggaagaattttgcgtcgcaggatattcggccttcgatcgatcgcatacaaaccgatttttcatttcagcgtgtaaacaattggagtggctttatcaataaatctttttatttcatcaattttacacctaatttcacaatcaggaaaattagagactaaacgatgaaacttttgcgatacatactatttgttatagcagttgtgtctctgcaatcaggattggcacaaagaagtgattatcaacctgaatttacagtgggagtaaagggtggaacgaccctttcgagagtttcgtttactcctactgtaacacaatcgctacttttgggttacaccggcggggtatcggttcgttatatcgaagaaaaatttttcgggttaattgctgaaatcaattttactcagtgcggttggaacgaaacttttgaagaagatccctatacctatactcatacgttgaattatgtgacaattccatttctgactcattttttctttggtaatcatgtcgtgcgtggatttgtcaatgcggggcctcaaatcggacttttattgggggatagttataaaagcaattttgacatttataatttgcctgagttcagccaaaaaagtaaggtaaaagaaatatatacgatggatatagcccatcgatttgattatggtattaccgcaggagcaggtattgagtttcgtataaagaaaacacatggcatcgtattggaaggccgatactattatggattgggagatatattcaaaaacagaaagaaagatgtattcgcggcttctcacagccaaataataacagtatcactgggatatttatatcacttttaatcagtgcattattttaaaaaccaattctttaagcaggtctccgtcattactcgaagctcctgagccgatacccttagagcgagcatcatactggcgtatcaatgcgataatgtcgatacatttaaatgcgttgtaagctcgcatggctgtcaaataatctctggattggaaagaagaccttagattcagttcgttcataattccattctccgacttgtctgtcgaaaaatagcatagcattagatttgaaaaaaaattgaataatacacttatcgtgacaaccagcggattgttcttgggattttgttcgaaatattgtatgatttgagtcgcttttaatatattccgggtgatgattgcatttagcaattcataattattgaaatctttactgatgccaacattacgttctacgatttcgggggtaatgcgaagactcccttccggaagtgaaattgataatttgtcgagttcgctactaagccgacttaggtcattcccgacaaaatcggccatcatagaagctgctttggggtcgatcgacagtttcttcgctactacgtagttgtttatgaatgccggtaactgattgtcatataattttttcgattcatatactactcctattttttcaatgccggcgacaaccttcttgtttttcagcgagccatttttatgacaaatgaccaagattgtgctcatcaacggtttttgtaaataatatagaagattatctacccctttgatattctgggcttccttaacaacaatcaattgtcgttcagccatcatgggaaaccgctttgctgcattgaccactatggcgaaatcgtcgatatcggctccgtataaaatggtttggttaaaatccctttccgagtctttcaaggcattttcgatgattgtctcacagattaagtcgatataatacgattcttcgcccatgagtaaataaacgggcttaaatactttgttgcgaatgtcttgcaaaatggcaagatgctgattggtatcttttttagccataattactcctcgtcgaatctcaaatgtttcaccgtcgtccgtttatctatgatcaattttagagcctccactcctatcaatacatgttcttctacgaaatctcgcgtgatttttttgtcactttcttctgttttaactcccgttgaaatcatcggctggtctgaaactaacaacaatgctcctaccggaatctgatttgcgaatccaactgaaaacaatgtggctgtttccatatcgacggccatacaacgtatgcgacgtaaatagtctttgaaattatcgtcaaactcccatacccgacggttagtcgtgtaaaccgttccggtccagtagtctcgatggtgattcctgacggctgtggaaactgcccgttgcaacatgaaagccggcaatgccgggacttctggtggaaagtagtcgttcgatgttccctccccacgaatggctgctatcggtaaaatataatcacccaatttgtttaccttttttataccgccgcacttacctaaaaacaatacggcttctggttttacggcacttaataagtccataaccgtagctgcattggcactacccattccgaaattaattatcgtcaccccatcggccgatgcactaggcatattactgtcctctcctaaaataggaacatgaaaatgggtagcgaatatttcgacatatttagagaaatttgtcaataatatatacttcgtaaaatctttaacgggtctttgggtatatcggggtagccaattctcgacaatttcttgctttgtcttcataaatatgtaattttggagtaaatttacagaaataattagaaagaacaaatatcaaatatgagatgatcgagttaaatctaccgccgtatccctataaagtaaaacaagaaaaagataagattcttattttcgacgaattgagaaggcgatatgtaaccttgactcccgaagaatgggttaggcaacattttgttgcctaccttgttaatcaaaaagaatttcctcgcgggttaatcgggaatgaaatttctttgactctcaacaaatgtaatcgccgatgtgatacgattgtttatgatcgaaacgggaatccattgtgtatagcggaatataaagcgcctcatgtcgagattacacaaaaaacgttcgatcagatcgttcgatataatcttgtattgcaagtgagctatttgtttgtttctaatggcatgaaacattattgctgccatataaattataccaccaatagctatacatttttacccgatattcctttgtataaggatttatagccacgcttatgtcttgtgttcccgacaatttttacgaacaagtatataacatagttagtcaagttccatcaggaacagtgataacatataaaagtatcgctgttttaatggggtatccccagcatgcccgtttggtaggacgagcattaaaacttgttcctaaaaacctgaatatcccttgtcatcgggtcgttaattgtcaaggacgacttgtccccgactggattgagcagaaagaactattatcccgagaaggaatattgtttacaccaaagggatatgtagatatgaaacgatttgcttggcgtttttgggattgattaaaaaataaaaagctcactgaaagtgagctttttttagaggttcctggcagaatcgaactgccgtaaacggttttgcagaccggtgcctaaccactcggccaaggaacctttattcttttgagtgattgcgagtgcaaaggtatattatatttttctattttccaatattcgagcttatttttttctatcttttcttatctattttttcgaccttgcaaggcttgttacacccgcaacaagcagaagttggcgccttgcgatttcgtaccatcttgaatatcttatgtataacataaaatacaactattaagaggataacacctactattaaagattgaatcgttgaattcataatttatttttccataaaataagtaaaacggttatcgatatcatcgacggtaataacattacggcgtttgtatcgcttcatataagataacatagataaatctccagaacaagaaacgatgtgaaacaataatattgcggcgatcgagatttttccccataaaggtactggtgacaaaagcaatagtatcaataataccgataggatataaaagggtgcgagagctattcgtcgaaaagttttataatcggccgcaaaattatgtgcagctgcataaaacacaaatgacttccagatggctccaaaacgtacatcattagcaccctcttttttgtatgcaatccaatgaataaattcatgtaccggaattatcagagcacaacccagaatagaaaatacgacacatttcaatatctgtatcccgaattgtgagaaagataacgaatcggaccatagttttcccatagcgaatcctataaaaaacagtatgaagaacccgcttatgaaaacgatccaaattatatgatttttacgaggtttgtttctctctaaaaatgtttttatatcgtcatatataaatgaatcaatgacctgatatccgtctttttcataagacgacaaaaatgtttgtttatccatactaaataattagtagtcctatttgatagactaaaaatgaaacgatccaagctactcctgtattgtataacaccgtaaatgccccccatttccaacttcccgcttctttggctactgctatgacagaggcgatacacgggaaatacagtaatacaaataccataaaggaaagcgctactaacggtgtgaaatcgggaatccccgtaacaggattcggctgtgatattttttgagacaaagatatagtttcgtcggcatcgctttcggagtataatacaccgagtgtgcttaccaccaattctttggctgctgttccagaaagtaaagatgtcgttactttccaattaaagcccaatggttccacaagtggggtaacagcttggcctattttccctaaataagaattgctttgttgttccatttgctcatgaggagtaagttctctttcataagaggctttggggcgtggatagtaacttaaaaaccacacgatgacagaggcaactaatataaccccacccattttgcgtagatattgttcggctttattccacatgtggcgaaaagtagctttcgctgtcggcatacgatatggtggtaattccatgacaaagggcgtttcatctactttaaagaagaaccgacgcatcaatttggccgtaataaccgcaacaataattccgaataaatacagtcctataaataccagactagcgtattgagggaaaaaagtacctaccaacaaaatgtaaataggtattctggcactacacgagataaatgggtttataagaatggttatcaatcgactgctgcgactctcgatagtccgggtcgccataatggctggcacattacacccgaatcccataacaagaggaataaaagattttccgtgcaaccctattttgtgcatgattttatccatgataaaagcagcccgagccatatatccagagtcttccatgaacgaaataaacagatagagtattaaaatgttaggtagaaaaactattacccctcctactcctccgagaataccatcgatcaatagatctttcaatggtccagaaggcatataattacctataatttcggataaccatgcgactccattttcgatccactccataggatatgccccgatggaaaaggtcgcctcgaacatcagccacatcaagaaaataaatataggaaatccgaatagtttatttgtgacgaaagagtctataatacgagtcgttttcgcttcctctttatctcccggtctatatgtttccgccaaagctcccgatatgaatccatacttttcattggcaatagccgactctatgtcttcattaagcgttgtctctattttctcgacttctgcattgcggatattcatcaattcgggataggactcggagccttccagcattcgcttgacttccgtatctccttcgagtatcttaatcgctaaatatcgaggtgagaactcccggttacaagtagggtctttttttaataagtcttttagaggggtaatactgttttcgattactttccctaaaccgacatgaacatgacgaaccgactcatcacggccttcatatacctcgataatggtatcgaatagttgatttacaccttttccagagcgtgatacggtgggcacaataggaactccaatcatatttcccaaatgcttatagtcgatttttccaccgctttgctccaattcatcaaacatattcagagcaatcaccatgcggtaatccatatctattaattctgtggtcaaatatagattcctttccaaattggaggctacgactacattgacaataacatcgggaatttcattttttaaataacggcgaacatatagctcttccggagaataggccgaaagagagtatgtacccggtaaatcgcatatattgaagtgataacctttatattcgaaaaaaccctttttagcatcgaccgtaacgccgctataattgcccacatgctcatgtgcaccggaggcaacgttgaataaagatgtttttccacagttgggatttccgaccaaagctatatttatcgttttactactttgggtaagcgctctttctatacagtcgtcttcctcggttttccaattttctacatttagtttgttttttcctccctgtcgattttcgagttgattcgcttcttcgggagtaataacttcgactaatgaagcctcactgcgtcttagagagatttcatagtccattattttatatttaataggatctttcaatggagcattcaattcgacaagcaccgtttgtccccgaacgaaccccatctcgataattcgttttcgaaatgctccatagcctaataccttaacaacaacagccttatctcctgtttgcaaatcggacaatcgcatactaaaaattttatcgtgttaatttcgattgcaaatttcgtaatttgttccgatttctattctattttctgtgtatattatttataatccgtataaataataacatatttttgcatactataaaataaagcaggataattttctattttatccagctttatttccgtttgtctgaatctatttataactgtcgtttgttgtctactccctcaacgaaatttataaaagcattattgactaatctgtttcctccgggagtaggatagtttcctgaaaaataccagtcacctgggtggttaggaatagcttgatgcaacccttctaatgtttgatagatgatttccacttgtgaagtaatatcttccgaagttaacatttgtgctattttcttcgatatttcctcttgggtaaaaggtgcataaatttcttttacatagttggttatctgttctttgggggaattttgctgtgctttggatttgttgtatacatcttcgatgatatgctgcattcccctgtcgttcagtaattctattgccgctttgaaagcgataaattctcccattcgggacatatcgatgccgtaacaatctggaaatctaacttggggagaagacgacacgattattatctttttgggatgcaatcggtccaatatttttataatactttgttttaatgtcgtgccgcgaacaatactgtcatctatgataaccaaattatcaatgtccgcttgtactgttccataagtaatatcgtatacatgtgcagccaaatcgtctcttgtatctccctcggcgatgaaagtccgtagttttatatccttgatggcgactttctcagaacgcactttgagtgaaagtatatgttttaactcactgtcgtttaatggagcagtagcattgcgcaacatatagaatttttgctcgctcaaataattattcagaccttcgagcataccataaaaagcgacctcggccgtattcggaataaatgagaatacagtatgctccaagtcataatcaatgctttccaatatttgagaagtcaaatatcgacctaattctttccgttctttataaatatcgacatcgctccctcttgaaaaatagatacgttcgaatgagcaggcgctgtaatttcgaggtggcaggatttgttctgtgtgtatgtttcccctacggtttaccaccaaacattctcccggctgtaattctttgacttgctccacggatagattcattgtagtttgtatcaccggacgttcagatgcgatgacgacaatctcgtcatcggcataataaaacgccggtcgtatgccgtgcgggtcgcggaatgaaaacatatcgccactgcccgtcattccacaaatcacgtatcccccatcccaaattcgagccggttttttgagaatatcggcaatattaagattttcctcgatcgattttgttattgcgatgtcgtccaatccttctttcttatatcggtcatagagcttttgattctccatgtcgagagcatgtccgacttgttccagcaagacaaaagtatcggcgtaactacgcgggtgttgcccctgtgcgacaatactattaaaaatctcatctacattagtcatattaaagttaccgcacagtaacaaatttctcgatcgccaatttcctcttctcaaaaaagggtgtacgtaagataagcctgaacgtcctgtcgtactataacgtaagtgccccatataaacctcaccggcaaacggtaaatgtagggctgcccagtcggcatctgccgtatcgtgaggagtgttcttgatttggtcctttatgtttgcgaaaatttcttgaattgcacttgttccgatggcacgttcacggtaaataaactcctcggctgggcgagcatgtaactttacgcacgctaaaccggctccttcttgtccccgattatgctgtttttccatcaaaagatacaacttgttcaacccatataaatatgaaccgtactttttttgataataagagagcggttttaacaatcgcaccattgctataccacactcatgcttaataatttctgtcatataatgttctatcaataatcaagaaacaaaaatgagccataacccgatatttttattttttctgttatagctcattttataatattcaaattttactgtcccgaaaatcaacgaatgaaaagtagttctctatacttcggtaacggccacatttcattgtcgaccatcaattcgagtttatctatatgataacgaatgtcatcgagttgcggggcaaccgtatcgtgataggcaatggctttctctcgttcgttttcaattttattcgcaaccttacgagcctcgaccatcgcatgtactttttcctttatagtcagcaaatggaatgctattttctcgatgacctccatatcctgagtggctatcaattcgcttttttcagccgggaagagactctttattttgaatacattatccagtaaaagagattggtaacgagttgccaccggaacaatatgattgatagccaaatcgcctaatacacgggcttctatctgtattttctttgtatatatttcccattttacttcattgcgtgcttgtagctcgacttgcgtaaagacatgcgtttgttcaaacattttcaccacatcgtctttcaaatagcagtcgaaaattaaagggacactggtctcgcaatccaaacctcggcgcttggcttcctccttccactcttcactatatccgtttccatcgaaacaaatatctttactttctgttattaaatcttttacaaccgaaagtatggcttgggttttctctttaccgttggcaataagagcatcaacttttttcttaaagtcttgcaattgataggctaccgccgcatttaatgcgatcattgccgaagcgcaattcgccgaagagccgacggctcggaattcaaaacgattgcctgtgaaagcaaagggcgaagttctgttacggtcggtgttatccattagaatttcaggtatttgagcgacatctaattttaatcccgacttaccgctcatgttcaaaacgtcatctgatgtactttctgccaacttttctaaaacctcgctgatctgttttcccatgaaaatggaaataatagccggtggcgcttcattggcccctaaacgatgtccattagtcgcagacgatatacttgctttcaataatccgttatatttataaacggcggccatcacattaactataaatgtgataaattgtaaattctctttctgggttttccccggagcaaaaagcaatacgccggtatctgtccccaacgaccagttattatgcttccccgatccgttaactcctttgaatggtttttcgtggagaagaactctgaaattgtgccgacgggcaacttctctcattaccgacatcaacaacaaattgtgatcgttggccaaattggtctcttcaaaaataggggcaacttcgaattgattgggcgcaacttcattatgacaggttttaaccgggatacccaacatgtgacactcgatttcgaggtcttgcatgaaagcttctactcgtgaaggtatagccccgaaatagtgatcttccaattgttgatttttggcactttcgtgtcccatgagagttcgaccggtaagtaccaaatcgggacgagccgcatacaaactttcatctaccaaaaaatattcctgttcccaacccaaataggaatagacgtgttttacatttttgtcgaaatatccacatacggctgttgccgctttgtttacgctattcaatgcttttaatagcggtgttttataatcgagagattcccccgtataggatataaatatggtaggaatacacaatgttttatcgagaatgaatgcaggagaagatatatcccatgccgaatatccccgagcttcgaaagtattgcggataccgccattcggaaaactcgaagcatcgggttcttgttgaattaacaattttcccgagaactcctcgactactccgcctttcccgtcatgctcgataaaggagtcgtgcttttcagccgtaccgtctgtaagcgggtgaaaccaatgtgtatagtgggtagcccccatttcaagggcccatttcctcataccggcagcgacactatctgccacctctctactcaatggggtactgttgtctatcgcttctataactgcttcgtacgtctttttaggtaagtatttaaacatcttttcccggttgaagacatatttcccgaaatattcagaaggccgttctttgggttcattaacaggaactgctttccggctgaatgcttcctttgctaccttaaatcttagcattgacataattgaacttattagattggtttgatatttttcttttcgttacaacttccaattttgaattcgtgaaatcgattctatcgtatcttcatatctgccaaaagccgttaatcggaaatatccctcccccgacgggccgaatcctactccgggagtgcctacgatatgacattcacaaagcaatcgatcgaaaaatttccacgaagataattcattaggagtctttacccaaatatatggggcattatctccaccataaatctgtaatccgaccttttgaagacaatctttcaaaaggctggcattacgcatataatagtcgatagattcttgtatttgtattttaccgaccggactgtaaatagcttcggcagcccgctgtacaatatacgatgccccattgaactttgtggtctggcgtctattccataaacggttgatatttattctctttttagaagtatcgtacaattttaattctttcgggacaactgtatatccacatcgtaggcctgtgaatccggccgtttttgagaaactgcgaaattctatggccactcgtttggcatcttttatttcatagatgctgtgcggtataccctcgtcatgaatataagcttcataagcagagtcaaataatatgagtgtttcattttcaagagcatagtttacccatttttttaattcgttttttgacaatgtggttcctgttggattattgggataacacagatatataatgtcgggacgtaccgaaggaggttcaggaataaaattgttctcagatgtgcaaggtatataaatgatattatcccagtgctgtccgtctttcgctatatttccggctcgacctcccatcacgttggtatctatatataccggataaacgggatcggttacggccaccctattttgcatactcagaatatccccgatgtttccgatatcgcttttggctccgtcgctaataaaaatttcgtcgggggctaagtcgactccccgatgtatataatcgttttcaataatttttttctgtaagaagtcgtacccttgttccggtccgtaccccctgaatgttttcgaatcgcccatttcatcaacggcagcatgcagggcttctattacaaccggtgcaatcgggcgcgttacatcgcctatgcccaaactgataatattagcgtcggggtgaagatgcttgaatgcttcgaccttcttttttatatcggagaagagatagctttcgggcaactttaagaaattttcattgattaatgccatttttcctatatattattgttccattctccttcaaaaaccgtaacggcctctcctgtcatataaactctatcattcttttcattccactcaatatccagatttccacctaacaagtgtaatacagcttttctattagccttcccatttaggacagcagcgactaacgaagcacaagctccggttccacaagcgagggtttcgcccgttccacgctcccaaactctcatttttaaatggtcgggagataaaatttctacaaactcgacattggttcttttaggaaacagttcatggtgttctatgagcgctcctatatgatgtaagtcgtatcgctccatctcattgagaaaaatgacggtgtgagggtttcccatcgaaacacaagttatattgaatgtattattctctatctctaacggataagatataatttcactcaaagatgtatttacaggaattttcggggcagataggataggatttcccatatcgacagaaaccctatttacggttccattttttacatctaaaatcaggtgcttaattccagccagcgtttcaagagtcaattgggttttggaagtcagtcctttgtcatagacatatttccctatacaccgagaggcgtttccacacatttctgcttctgtaccatctgcattgaacattctcattcgaaaatcacaatgatctgagggcataataacaactatcccatcggctccaatgccgaagtgcctgtcactcattcgtcgagataatgcacttaaatctgccggtaatttctcgaaaccattcagataaatataatcattacctgcaccctgcatttttgtgaatctcataagagcattctttttgatactacaatttagcttttaagaactaattgtagttgttttgagacaaaaatagtcgttttgataaatatgataataaaatataaatataaatattgtataaatatatttcgataatataaacaactatctgtatattattgcagaataatagcataacaaaaatttatttttacaatatgtttataaaaccggaagaatagggattttttcattacctttgcatggttttcacgatagaaatccacaatatttattcgagctaattactaatacaaaatataattctatcgtaatgcaaacaaaaagaaaggcttctctaatccttgatgatggaaccgtattcgaggggaaatcatttggctacgaaaaacctgttgctggcgaggttgtctttaatacggctatgatgggttatcccgaaagtttgacagacccctcctactccggtcaaattttagttactacttatccgctcatcgggaattatggcgtacctcgtcgtgaagaggaaaatggattatctcgattttatgaatcggaaaaaatccatgtcgaagcgttggtcgtatcggattactcgtttgaatacagtcattggaatgctgataaaagccttgccgattggttgaaagaagaaaaaatcgtaggaatttacgatatcgatactcgagagttaaccaaactattgcgagagcatggttccatgaaagggaaaattgttttcgaagatggtgaagatattgatttcgtcgatcctaatttaactaacttggtcgccaaagtcagttgtaaagaagtaattcgatatggtaacggtaataaaaaagtagtattggtagattgcggtgtaaaacacaatattattcgctgcctgctcaaaagagatgttacagtcattcgagtgccgtgggactatgatttcaatacgattgaatatgatgggctgtttatctctaatggcccgggggatcctgatatgtgcgatgttacggtagaacatattcgtaaagccatgaatgggacaaaaccaatatttggaatatgcatggggaatcagcttttatcgaaagccggaggtgctcgcacctataaacttaaatacggtcatcgaagtcacaatcaacccgtgcggcaagtcgggacgaacaggtgttttatcacctctcagaatcatggctttgcagtcgataattcgactcttggatccgattgggaaccgttgtttatcaatatgaacgatggcacgaatgaaggaatacggcacaaatcgaagccttatttctcagcacaattccacccggaagcggctagcgggccaaccgacacggagtttttatttgatgagtttgtaaatatgttgtaatccggaaataaaaagccttatgaatcaaactgaaataaagaaaatcaaaaaagtattattgttgggctccggagccttgaaaataggtgaagcgggtgaatttgactattctgggtcacaggcattgaaagcgctcaaagaagagggtatcacgactattcttattaatcccaatattgcgacggtacaaacttcggaaggagtggcagataaaatttattttctgccagttaccccctattttgtagaacgtgtcattcaaaaagaaaaacccgaagggatacttctggctttcgggggacaaacagctctcaactgcggtgttcaactctatcaatctggaatattagaaaagtataacgtacaagttttgggaactccggttcaagcgattatggataccgaagaccgagaacttttcgttaaaaagttagatgagattgatgttaaaaccattaaaagcgaggctgtcaattcgatagaagatgcagcgaaggcagcttccgagctgggttatcctattattatcagagcggcctatgcattaggaggattgggcagtggtttctgcgataacgaggaagaattgcgtgtaaaagcagaaaaagcgctttccttttccccacaaatactggtggagaaatcgctgaaagggtggaaagaaatagaatatgaagtcgttcgagatcgttacgacaactgtattacagtatgtaatatggaaaatttcgacccgttggggattcatacgggcgaaagtatcgttgtagcgccttctcagacattaaccaatagcgaatatcataaattgcgcgaattagccatacggattatacgccatatcggtattgtcggagaatgtaacgtacaatatgcgttcgatcctaaatcggaagactatcgggtcatcgaagtgaatgcgcggctaagtcgttcgtctgctttggcttctaaggctaccggatatcctttggctttcgttgcagcaaaattgggattgggatacgggttgttcgatttgaaaaactcggtcaccaaagagaccagtgctttctttgaaccagctcttgattatatcgtatgtaaaattcctcgttgggatttgggaaaatttcaaggtgtagacagggagctcggatcaagtatgaaatcggtcggagaagtgatggctatcggcagaacattcgaggaagccattcaaaaaggactccgtatgattggacaaggaatgcacggattcgttgaaaataaagatttggttattcctgatatcgacaaggcattgcatgaaccgacggataagcggatattcgtgatcagcaaagccatgcgtgcagggtataccgtcgatcaaatacatgaattaacgaaaatagatcgctggttcctgcaaaaattaatgaacattgttcgtacagctcaagagctggaaactctcgacgaatcgatcgcacaattcaaaagcgataaaaaggccggggcggaattgatacgtcgggcgaagatacaagggttctccgatttccaaatagcacgagccatttggaaagataaaatggaagattgccatatgcaatgggtgcgtaaatatcgtaaatcattggggattgttcctgttgtaaaacaaatcgacacgttggcagccgagtatccggctcaaaccaattacctttatttgacttatagcggtattgccaatgatgtgaaatatctcggagacaaaaaatctattgtcgtattggggtcaggcgcttaccgtataggttcctcggtggaattcgattggtgtggagtccaagcgttgaacacaatacgtaaagagggctatcggagtgtaatgataaactacaatcccgagactgtttcgacagattacgatatgtgtgaccgactctatttcgatgaattgacctttgaacgggtaatggatattctcgaattggaaaatcctcatggggttattctttcgaccggaggtcaaataccgaacaatttggctacccgtcttgacgaacagcatgttaatatattgggaacgacagccaagagtattgataatgcagaagaccgtcacaagttctcttctatgctcgactcgttaggtatagaccagccccgttggcgagaactgacgtcgttgtcagatatttacgatttcgtgaaagaagtcggttatccggtattggttcgaccctcttacgtgctttccggtgcggcaatgaatgtttgttcgaacaatacggagttggagcagttcctacaactggcagctaatgtttctaaaaaacaccctgtcgttgtgagtgaatttattcagaatgccaaagaaatagaaatggacgctgttgcccgtaatggtgaagtcctgatttatgccatatccgagcatattgagtttgccggtgttcactctggtgatgcgaccatacaatttccacctcaaaaattgtatgtcgagactatgcggcgtattaagaaggttgccggacagattgctcaggcgcttaacatatcggggcctttcaatattcaatttttagccaagaacaacgatatcaaggtcatcgagtgtaacctgagagcttctcggagtttcccttttgtatcgaaagtattgaaaattaattttatcgagttagctaccaaagtaatgatggggcttccagtggaaaaaccgaataaaaacgaatttgatttggactatgtcgggattaaagcatctcaattctcgttctcccggttacagaaggccgaccctgtattgggtgtggatatggcttcgaccggcgaggtcggttgtatagggctcgatacgagtgaagctgtattaaaggctatgctttcggtcggatatcaaataccccaaaagaatattttactctcaacgggaacaacaaagcagaaagccgatatgcttgaagcagcgcaattattgtatcaaaagggatataatttatttgcaacaggagggactcaccaattccttaccgataacggtattcctgcggtgaaagtatactggccgagtgaaagtgaccgtgagcctcaggcattagaaatgttgcacaataaacaaatcgatttggtagtcaatattcccaagaatctaactcaaaaagagttggataacggatataagatacgccgagccgccattgactttaatatcccgcttattacaaatgcccgattggcatcggcatttattcaggcattttgcagtttgagtatcgatgatatacaaatcaaaagttgggacgaatataaatagcaataaaagagtgatgatcgataaaaagagggtgtccgtaaaggataccctcttttttatttactcaatgttttataagaaagaatatgccaagttatacctatcgctaaaactataaaaagagatgctaaccatatatttccagacatgaaaaatgaacaatacagcaaagtcagccaaactaatgaaacggagataacctttactcgtagagggatagctttgttttccatgaaatttcgaatgtatggccctaaccgtttatgattcaatagccacttatatagtctcggggaaccacggaaccataaaatactagataacaaaagaaatggtgttgtaggtaataaaggtagaaaaatccccataactcctaaacacagagagatacttcctaaaacgatatatatgactttcacatcacaaaaatacaataaatatcgaatatgctttataaataataagaaagggagtatcttttcagatactccctttcttattatttgtcaggaaatcgaggaattacatcattccacccatgccgcccattccgggagccggcatagcgggtgcaggattttcctctttcttatcggcaatcacacattctgttgtcaagaacatgcctgcgatagaggctgcattttccagagctacacgagttaccttagctgggtcaataacgcctgctgcaaagaaattttcataggtatctgtacgggcgttgtatccaaagtctccttctccgtctttaaccttttgaacgacaacagcaccttccactccggcgttagcggtaatttggcgaagaggttcttctatggctctttttacaatttcaatacctgtcgtttcatcttcatttgctccctttaaaccatctaatgcggggatacaacgaatgtatgcaacacctccacccggaacgatgccttcggcaatagctgctcttgtagcgcttaacgcatcgtctacacggtcttttttctctttcatttcgacttcggaagcggctccaatatagagaactgcgactccaccagctaatttggctaaacgttcttgcagtttctcacgatcataatcggaggttgtcgtttctatttgggctttgatttgggcaacgcgtgcagcgatggaatctttgcttcccataccgttgacaatcgtggtattctctttgtttaccgtaatcttttcagcacgacctaacatttcgattgtcgtcgattccaatttcaatcctttttcttcagaaataactacaccacctgtcaaaacagctatgtcttcgagcatttctttacgacgatccccgaatccgggagcttttacagcacagattttgagagacccgcgcaaacggtttacaaccaaagttgccaaagcctcactatcgacatcttctgctataatcagtaaaggacgacctgtttgtgccgtagcttcaagaacgggaagcatatccttcaaggcagaaatctttttgtcgtagatcaaaatatacggagtatccatttcgcactccattttctcggtattcgtaacgaagtaaggagaaatatatccccggtcgaactgcataccttctacaatatcgacagtcgtatcggtacctttggcctcttctaccgtgataacaccttctttctttacttttttcatagcctcggcaatgagttggccaatctcgctatcgttgttggccgagatacgagcgaccgattcgattttctcaaaatcgtcgcctacttcctgagcctgagccttgatgccttctaccactttggctacggctttgtcgatgcctcgtttcaaatccatggggttggctccggcagctacgtttttaaggcctacgtttacgatggcttgtgccaatactgttgctgtcgttgttccgtcaccggcatcatcgcctgttttagaagcaacttcttttaccaattgagcacccatgttttgaaatgggtcttccaattctatttctttggcaactgtcacaccatcttttgtaatatgaggtgcaccaaactttttctcaataattacattacgacccttaggaccgagagtgactttaacggcatctgccaattcatcgactccttttttcaattcttcacgagcttgaatattgaatttaatttcttttgccatagttttttacctaataaagttaaacattaaacacattaaagaatagctaaaatatcggattgtttcatgatcagatatttctcaccatctaactcgatttcggtacctgcatatttgccatataaaacagtatcgtcgggttttaccaccatttcttcgtccttcgtaccattaccaatggcgatcactttacctttgaggggtttttcctttgccgaatcggggataataataccaccgattgttttttcttctgcgggagctggaagtaccaatactctgtctgctaatggtttaatcttcatcgttttttattttagttaatgtttcgttttatatataatgttctcgctttcgtgagaacattatatatatatccaaatctatgccaaaagatttatttgcttaaaatctgacaaaacgtcacctgagaattgtggcgtcgaaataattactgacaaagattcctcctcttttcacttagaaagaacaggtgtcattgtcgaaaatttattcaagaaggaatggctattaatggagtgtcggtgtgaaataacattttgtgagcgatactcggattgaaaagacgtgcaaatatatttcgtttacgattgggaacaaccataacatctatggccgattcatgaaaaagtttttctacgttatctaaaaaattttcctcaccgataatcttataatctatttctcttcccggataatgagattgacagtagtctcgaatacctgctaatttaatttctgtccatgcatcgcttttttccgttaagtgtaaaaacattataccaaacgaatagttttcgaataaacgcatgaacgtgtccagagagattaaatcctgttgatcgaaattagtaaaaaaagcaatgttttttatttcgttcatacaagtatgagtaaatccttctgggacagcgaacaccgggaaattaccggaatctactacttctgccgtgacactccctattagatcgatctctttacgagtttttccccttgaacccatgactatgagcgatggattcaattccttagccattaagattatcgtatcttcagggacaccttcacacaccctataaatgaatggtgcagaaggaaaatctccatctgtcatcaatcgctgcaatttttcgcaaaagtttgccatctcccgattggcctttgcgaataatagtttatgttcttcactctcttttaactcataggagattgtctctgtcaaggagagtgaccctgtggaaaaaggagataaaaaagtatgtagtaatacgacttctgcttgatgggtagctgcaaaatcaaaacctaatcgacatgcttgtaaagaataatcagaaaaatcaatcggtataagaatcctatttttctgtggtttgtcagaaacttctgatttcccaaacaccggatcggtttctaaaatctcgagggcgtgaggcaaatctttctcatgaattcgcactcgcacccccggagatataactggttttaataaattgacattctgaattacgacagctattccttgactttccaaaacgccctttaaaataagagcctttggataagtatgaatcgccaacgttatcaacctgtcttttttcattgtcaatttatcccttttattttttattttcttcttcaagaatacgaattgccatatcgtatatttgcgtattatcaaggactacgattcccccgtcgggccccggttctatgtgaaggccgcaatttttcccaaatgaataattactgcctccgaaatagttacgtacggtctgtgtggtaacattcaactcatctgctattctatgcattgaaccatctggcaaactgtctttgatgcgacgaagttcgttaaatgtgattgtcttagtcataagggtaatgtttttatggttaattatttggttaattgtactctattgaatacgcaataaatttatgctctattttctttatatccaaattttgtgagtaaaattttatgaagcatcaagaatatgttgcaatcaaggcataaacagctatgcagagtacacttaaatagattactcccgtcgttattcgtatatcgggatcttttatgtatggcgattccctattgttcaagaattttttatttaacaaaaaacttcggaatccatttaatacaatacaaattatgacagcaataattgttcccgaaattatccccgctaagatatcacccggataatgaacgcctaaatatatgcgtgaatagcaatttacgatagcccaaatgagcgatgtgactgcaaaaaatttattccgaaaaatcatggataacaggaccactgctccgaaactattcgcagcatggctggatatgaatccataacgtccgcctctataaccatttactatttgcacaaattcggataattcaggatcacgggctggtctcaatctggcaaagtaaggtttacacaaagtagaggcgaactggtcgcagcatgtaatggttattgcgagagctacacagaccaatagagcttctttccaattttttctgaataggacaaatagaagagataatatcaaaggtatccatgtgtattttcctgtatatacccacatgaatttatctccaaacggggtatgcatactatttaaaaatagtaataattctttatcccattctattaattgttggagtatcgacatagaattagataatttctattgacgaagagggtaaccacccgcgatttccgtcacttatcttgacctcggaccagtctcccaatttacttaatatagagaccttagtcccctcatgtaaaataaagaggtctgttccactttctgccggagaactttttaccggaacagtcgcagcaaatacgatggcttcactacgggcttttaacttactattcagtccccatgcaaaccaattggcaagaacagcaatcaagaaaagtataattcctccaaaaaaaccgaatttctttgctttgacagacttggagaacagatataaatatagacctccgataaacaatagaaatgaaactattcctatgactgcccatgtattcgatgacaaaaaattgcgtaatgaatctatccatacggaaagaaagaacttacctaccgggtcgattttatcaacgatgtgggtattggccatctctaaattaaaacgggcatcttcattaccgggattcagtaatagagctcgttcgtaatttagtattgctttcgcaaactcattgtgtttatagtaagcattgcctaaattataatataaatcggacgatacgccttgttctcttaatgtctgctcatataattctattgccttaatgtaatcttcctgcccataagcttcattggcttgtgtcaaagttgtctggctatatataggcgatattcctataactacaaaaagtaaataaatatatatctttttcatttttccctattttacttttttactgtattttccattctgcttatagcatcgagagtttgtgaatataactcctccatagtttcatttgattgtgccggtgcatattgagcgaactcacatcgactcaggatatcattgaacgtagatattagatcttctcctgccccatatttttccagctcagttgcaacattgtccttagtaagttcagaaagcggcagactgagtttatcgctcaaatatccccatatggctttgagtacttcgtcgtaaaaatgttctttgtcatgatttttcagatatttccctgcaactttcaatcgcttcaatgcgaccttattggcctttttgtttttcatcagagcgacattggcattcgcttttgcttgtttgcgatttataagtacaaaaatacaaaaagctaatgtcggtaaaatataccagaaccaatatttccaattatctacatatatcgaaggagtctgcaccaagttcatcttgtttaatttaatgtagtgaatgtcccggttcagtaattttaaatcttctttgttggaaaaattagaaacggtttttcctccctcaccagaagcacctttttcgactgtaatctcgtactcttctgtatgtaaagttttatattgtttggattttgtatcgaaataggagaactctactgccggtattttgaatttacccgcaaaacgaggaatcgtagtatattctaccgtccgagtaccgctaactcctcctgtcgtagcttttaccgaaacatctactttggggtcgtaagtatcgaaatcgttgggtaatttcaaatcgggatttttcatatatttcaaatttcccgaacccttgaatatcaattttaaagttattgcttcatttgctttcacatgtgtagaactaatcgagctactcaatgtaaaattacctactcctcccataaatgagaccggtttacccgccggtagaggcattacttcgacagaagcagcattcgaactaacagatcgacttaccccttgtgggactctcatcgggccgaacggtccattaacgagttggtatgtttctacttgaaattcgaattttcccggatttatagttattttcccggtacgttgagggaacaaaaggcattgtttcaaaatcgccattttatagttcaccccattgtaattttccaattcgaacgacgtgttttgaggtaagtctatatcctgtaccacaaatccttcgaatgaagggaagctataattctctgcttgtacacccgatgcccgagtgtataattttatcgttgccagcaatgcttcttgttcatatacttttgtcttcgaaagtacagtccgaataaataattccgtatttccagcttcttctcccatcgactgtctcgaagcaccgcctgccgaggacgatgttttatcgggaggaagtatcgttaacttccatgtattggtagaaaaagtacgcccatcggccgagattgtagccggtgcaaaagtgtagctaccttctttttccgctctcaaagtaattacatgtgtttccgttgtttgtctatcgacattaccgtttacaacagatacactcgtgcctgagctcgttccttgatataatactttacagccagaaaattcaggtaacctcaaatctttacctgatgcattatacaaagtatattccaattggaattgttgcccttgtatcacttgtctgggtccatctactgcaaaccgcacattatcggcccacagagttgccatacagaccaaagccccaaacattattaaatattttctcataactatttatataactatgttatatgattctaccattctttatcggtctttttacgtttttgttgctgcatcagcgctttttggactttttcttgtgtatctcgttcgtcctgttgaatcgcatcgagaatttgttgtgcattctctttcgacatttgagattgttgtggttgttgctgctgtggtttattttgttcttgttgatctttatttttatcttggttattttgattgttgttttgctcttgttgatcttgcttttggtctttttgttgatctttgttcttatcttgctggtctttgtcgtcgtttttatcttgattttgttgctcttgttgttgtttctttaacagcaattgtgccagtctgaggttgtaacgcgtctcgtcgtccttcggatttcgtcggagagcatttttatattcttctatactttgagcataatttttttcttggaacgatatgtttccaagattatgccaagcgtgtgctgctcgtaaagaatcggacgatgcttgtacgatttttctatattcgttgcgagaatcattccatttctgctgtttgtaaagcgccgcacctaaattgtatgttgcaatttccgacgaagggttagcttccagagctttacggtattcgatctcagcttcggtatattttttatcgttaaataatccgtttccttttctaatcgtattgcgttcgactttttcatctattttattttcaccttgcgcaacagcctgtgcattctcttgtgcgagcaaactcattgtcatgctcatcaacacaaaatacattatatatctgatagatttcatatctcaacatatttatgaaaagaaagttatcttttttaaccaactgttctttctgtctacaataaacacatctactattaataataacaatgctatccacgccagcccctgaaattgttcatcatattgcgaatagaccttactctcaatatcggcttttttcattttctttacttctgaggtcaaggctctcaatgcactattggtattatcggctcgaacataaataccagttcctgcctttgctatttcttggccgagagactcgttcaatttcgaaataactacattaccgtctctgtctttaataaagttattttcactgttcccggtcgggataggaacaccttccaacgacccgataccgattacatctactttgatattttttccggccgcagcttttgccatttgaacagcatcgtcttcatgattttctgcatcggttatgacaatgattgctttatctaccccttcgttgggtgtaaatgaattcatcgcagtagaaatagcccgaccaatagctgtaccttgtgtcggaaccatattgggattaatggtattcaaaaacattttagcagacacaaaatccgatgtaatcggtaactgagtataagcatctcctgcaaaaacaataagacctatcttgtcgttgtccaattcatctacgagtttggacaacatcatctttgctttttccaatcgattaggcgctatatccttcgccatcatcgaattggagacgtctagcgctatcataatttcgactccttgtttctttacggtttcgagtttagaaccgaactgggggcgcgccaacataaatacaatgacaataaacgccaattgttgaataataaatttaatccacggtttatattttgagacatcggtcatcaaaggagccagcaccgacggattgccgtacttggccaaattacgtcgggaccgataacgcccatagataaacagtccccacaatataggaacaatgatcaataaatataggtattcaggttgtgcaaatcgaaacataatcaacttctgtttaaggaatatttttcaataacgtatgacgaagaacaatttccaaacctaagcataagagagccattaatgcccaaatagtgtattcttcctcttttacgctgaattctttaactgttagcttcgttttctccaatttatctatttcctcaaaaatacctttgaggacgtttttgttcgttgccctgaaatattttccatctgctgtctctgcaatttgcttcaaggcctcttcgtccatttcgaccggcatattctgatatgtaatgccatacggtgtctgaaccggtgtaggcgctaatccttttgttcccacccctatcgtataaacgtggattccaaacgacttcgctatttgtgccgcggtcgccggcgcaatgtcaccggcattgttcgtaccatcggtcagcagtataattgtcttcgatttggctggtccgtcttttattctgttaatagcggttgccaaaccatcaccgattgctgttccatcgtcgaccataccgcaatggacatctttcattaaattaagaaggacggcatgatctgttgtcatcggacacatggtaaaactttccccggcgaagatcaccaagcctatattgtcgtgttctctcccggaaacaaactgtgcagctacatcttttgccgcctctactctatccggtttgaaatcgcgggctaacatacttccagaaatgtcaagggcaagcactatatccactccttcggtagaggaattttgccagctatcggtagattggggacgagctaatgcaataatcaaaagaaccactgccaaaacacgcaaaacaaaattgaaatgccgcaggtaaattttgtatgtacgcggcattttatcgaatggctgtgtcgtagagacttgtagtgcagcctgcatacgcttctgtttaagaatataccatgctattaccggtataatcaataacaacagaagtaaatataaaggatttgcaaataccattttcaaattattttaaaggctgttatcaaccttcgttcaacatctctttttattccgttttttcggaagcctgattctcggattcaggagccttttcttccggtttagtctcttcaacaaaagtctcggcataacgcattacctgctcattgtcgtccggcagaggtctcatttttgcgaacttcacgaaatcggccatttcaagaatatctcgtaattgccgattgacagcttttgtctcttcgttacgatgcaatgtttcaataatttgagaagaagtcatttccattgcattgatatgaaatcgttcgtcgatatactctctaagaatctccgttaaagtcgtataataggccttctcctgaccttgttgccaaagtttagagtcttttaattcgtgtaaagcttgtattgcccggtcataaggcggaaccaacattttttcatcgataatttcttcgccttttttccgccgcccccaacgccaatatgcatatattcctgccgctatgacgattaaagcgaccaataaatatattacccacgacggaatgtaatccatcaatacgaaaggtggtgcatctactccttttatatcgaactctgcatgagttgtatcaaccggaaccggtactactttgagactcaacgcctgagtctcgaaagtatcgtcttctatgacatatttgaacggaggtaggtaataaagtcccgaatcgaacgaggtgacaagaacttcattatttatttgtatccgattgtttttcaaatcaatcgtatcgggtttagataccttcaacacttctacgcctgtaacaagcgtatcttgaataatgggtaacttcacaaatttatctttatcctgagaaacctctaatcgtaccgtagtttgatctcccatcataatagcggcagaatccatttgggctcgcacgactatattattctgggcagatacagttgccataaataccggcaatacagaacaaagacccaacaactgtaatattatataccttcttttcatatatacatagatttttaatctaccctcttcgcttgaagagagtcataagggctacgacaaaatcatcgtttgttgcgatagtcgctaaatcgactctacttttacgtaaagtcgcaagcattctttcttgtctcgaattccaccaagcggcatatcggtttcgcacgtttgccgaagacgaatctacccactgctcacaccctcgctcggaatcttggagtttaatcaatcctacatcgggtaattgagtttcacgtcggtcatatacttgtattgccaccaaatcgtgacgacgatttgctatcgataaagcatttttatagtcgttcccgtccacgaaatcagaaatcaaaaacgtcgtgcatcgtttcttgatcgcgtttgtcatatattccagagccaaacttatattagttcctgtactctcgggttggaagtctataagttctcgtatgatatacaaaatatgcttgcggccctttttaggaggtatgaatttttctatcttatcggaaaaaaatatcatacctatcttatcgttattttgtatagccgagaatgcaatggttgcagcgacttcggccatcatctcacgtttggcctctcctaccgctccaaaatttctactggcagagacatcgaccaaaagcatgactgtcaattccctttcttcttcaaatactttcacgtaaggtttattgtaacgtgccgtcacgttccagtctatatctcttacgtcatcgccatattgatattctcgaacttcggagaacgccataccccgacctttaaaagccgaatggtattgccccgcaaatatattacgggaaagacctctcgtctttatctcgatatgacgaactttttttaacagctcactggtttccataaattatatcccgaacatcgtttagggaacttctaccttattgagtatttcactaataatttcttctgcggtcatattgttggcctcggcttcgtagctcaacccgatacgatgacgcaatacatcgtgacaaacggctcgcacatcttcgggaataacatagccccgttgttttaaaaatgcataagcccgggctgctaaggccagactaatagatgcacgaggagaggccccgaatgatatcatttctttcagctctcccaaaccataatcttgggggaaacgtgttgcaaatacgatatcaacaatataccgttctattttttcatctatataaactttttggacaatctctctcgcttcaataatctcagacggttgcagaacgggtttaatatctatttttcgtccgcttatattctgacgtataatgagtttttcttcttcttttttaggatatccgataattactttaagcataaaacggtccacctgtgcctccggtaacggatatgtaccttcttgctctatcgggttctgagtagccataaccaaaaacggatcgtctaatttaaacgtctgctcaccaatggtaacctgacgttcctgcatggcctctaatagcgcactttgtacttttgcaggagcccggttaatttcatctgctaaaacaaaattggcgaaaataggacctttcttgatttgaaattgctcttttgcctgactatatatcatcgtacccatgacatcggcaggcagtaaatcgggcgtgaattgtattcggctatattttgcatcaatgagagaagccaatgtttttatagccaaagtttttgccagacccggtacaccttcaagcaagatatgtccgttggataacaatcctatcatcagtgaatccaccaaatgtttttgaccgacaataacttgatccatgccttgtgttatcatattcacgaacgaacttttactggcgatcagatcgttcaactcccgaatatctactgtttcactcatacgttttatctttttgtatttttaatttatacgttttttgactttctctgtcgcaaaattagccatacactggttctatatatacccaatcgcgttaaaaatggctaactattcacttaaaaaagactaagtcgctaacttattcagctaacgactctgttgatatttattcataacgactctgtattttcgcggctaatgccttagcgttctcgacagaagtcctattgtttgcatcaatatcatatttcgatgcacttggaatggttaaacgagtcccaatcggaacttgattaggatttttaatcacgtccttgttttcttcataaatatacacccaaaatgccttatgcccaaaatattttcgagccaatgtcgtcagaaatactcctgatcgaatagtttctataaccggcttgacctcaggtgctgcgaggggagaaaccgagattaccgagtctttaaggacagaatccttttccatttctgaaagtgtatctttattttccggtagaacaaccgattcgggattgttgttcatgggtcgcgaatcgatcgactgctttcccaaagacagagtatattctccgattttcacaacataagggctatcatttcccataaaaaatatacctccggccaagcatattataataatgccgaatgcggacagtacaccccaccagaatgattttcgagaagccgatttccgcaaataatcttcataacaatcttcctctttttcttctactttcgtctctgattcgggttgaataatttcctcttgaaatttctctatttcctgtgatgatacagtagattcagaagattcttcatcggctgatttatcttcctgaatatattcatgagccggttctatgggttcatcttcctcttctttttctcgaatttcttttgaatcttgtagttctacattttcggtattacaaatgtcgttattttcatctatatcttgacttggaacggccgtcatatcctcaatcggcacatgatcattgaggacttcgacagaaaagctggaaaatggggcattaacagcttcacgcagtactttatcaggaataaaagacagtttatagtgccccggtatctccacaggttctccggtttgaacattgatacttcctcgggcttctacccatataggtttaaataaacctaacccgtttattctcaactcttcaccagaagttatgacttctgttgaaacagtaaaaaattctttcaaaaaagtttcagcttctttcttcgtgatattcatctttgaagaaagcaatccaaccaaatcgggaaaagatattttttcgttcatttggaagacaacattttaagtttagttttaatagcactccccggtttaaatgacagaatcatcttgggagggacaagcatacgcttaccggttgacggattcacgactactcgttccaatttctttttgggctcgaataacccgaatccttgtattgccacagtgtccatctgagaacaacgttctttcaaaatttgaaggaatgcagacatatagctgtcaatttctcctttatctttgcccaatcgggattgtaattgtatcaaaaaagatttatgatccattctctattattttttattgagagaagtttgttcgtaccattaatagcctatgtgcaaatttagaaaaaaatttgtacaaacgtacattatttgtatatttaccgttacttaatcaacataaaccactatggaaaatgttcgaaaatattttaaacgcgatataagttggctttcttttaattacagagtattaatggaagctatggatcatacggttccgttatttgaccgaataaaatttttgtctatctatcagtccaaccaagaagaattttatagagtgagagtatcggaatatcaccaaatactatctgatccactgcaaagcatcgaggataaacgacaggccgaaaatacactgagcgcaatcaatcaagaagtaaatcgacaagtagatattttcaataagttctttttcaacgagattatacctgaacttgaaaaagaaggaatggtattgtatcacaacgaacaaatagaaaattgtcatcaagaagagattcgtaatttctttaaagaagaggtattccctttcctacaaccggtcttgatcctaaaaaacgatattgtatcttttttacgagacaatcgactttatttggccataaaaatgtacaagaaaggagatcccgatagacaaccgttttatgcccaaataaagataccatttagtaaagtacctcgtttcataaatctcacacctcacgatggcaaaaattatctgatgtttatcgacgatatgatcgccttaaatttagacgtcgtatttcccggatttattatcgattctcactatgcgataagagtctctcgcgatgcagatttttccatagaagccaaagaggtagcgaacatcgtcgatgcggtacgcaagcgcgtaaagaagaggaaaatagggaatgccaatcgattggtttacgatggctgcatgcccttagatatgctgcaatacatttgtgatgcctatgatattcctcacggacagtgtattcgatcagggagataccttaatttggaagatttatcgaagttaccgaatctaaccggaaaagaattaagcgaagtactcccctcgcctatgcagatactggcattcgatagtgcaccaaccatgttcgaagttattcggcaacgggattttctaattcattttccatatcagtcgtttagttatttaacccgttttcttaccgaggctgccgataatcctaacgttaccgacataaaactcacccaataccgtgtcgctgaaaattccgaaatcatagatcgtttactttatgctgcacaaaagggaaaacaagtaactgtatatgtagagataaaggcacggttcgacgaggaaaacaatatcataacttccgaactgatgcgaaaatctgggattcgcgtggtgtatagtactcccggattaaaagtacatgcaaaagcattattaatcaaatgttctacacttcacaaaaatcagccacaagcttatgcttttttaagtacagggaattttaatgaaaatacggctcgaatttattcggatatgggcctgttcactgtaaatagggaaattaccagcgaattggataaattattttccattttagacggctcgtcaaatgaccgatatttccaaactttattggtcgctcaattcaacatggtcgatgtgttgaaacagaaaataaattttgagatcgaagaggctcgtcaaggtcggaaagcccatattatattaaaaatgaatggactgcatgatacgaatatgataaatgctctttatgatgccagcgaagcgggtgtacatatagatttgatcgtaagaggtattaattgtttagttcccaaccaaccttacagtcgcaatatccgtatgattcgcataatagattcttatttggaacatgcgcgtatttggtatttttacgctggtggacatgaggatatatacctttcttcggcagattggatgcgacggaacttgaacagacgcattgagactgctgttcccatattcgaccaaagcataaaaaatgaaatattatcaattatatctcttcaactgcaagataatgtcaaggcttgttatatagacgaaaatttagaaaatcactatgttcaaagtcgggaaacaaagctccgttctcaacgccactgctttcaactgttagaaaaatattctattcccgacactcagtctgtgatacccgaaatttttatcagttgattgggatttactaatttatcattcggtaatttcgacattgttaccttccgggtcgagtatagtactctcataaaatccatcaccggtaagccgtggttgtcctataaccgtatatccatcggtttgcaaacgtcgggtaagctcgtcgacagcttctcgactacctaccgatatagacaaatgggccaaacctttcacttggcctcggttgaaaggcatatctaaaatatcaggacgattcattaattcaatacaagctgttccctcatcaaaagataaaaaataagaagtaaatttcttagattcattgacatatctgtcattgcataaagcgccgaaatatttcatataaaaaagacgaaccgattcgatatcgtctgcccatagtgcaacgtgattaagtctcatatgaatgtgtaatttttgtacaaatgtacattacttatctatattacaaattctcatcgattaaaaaaaattaaaagaataacgattatcatgtgattttcattttgttttttattattatttttgcagaaaaatctcaaatcatgaaaaagatagtatttttatttctaatttgtatgccgatatgccaggttgtatcggctcaaaccttaaagaagcagaaccaaatgctgaaagattccatcggtattatgcacaaagtaatcgatgaaaagtcttcggtaaatagtgctttatcgaaagacaacagtacacttaaaaatcaaaatgtattactaaaagccagtaaagactcattgattaaagagcagaaaacacttctcggtaaatataaaaatttatcagaagaaaacgatttattaaaagattcgctttttatatatcggggccaaaataaaacattgaatttacaagtagatagccttaatacaaaaattgagaatcttaccgaagaaatgaatacaaaacttgattacatggctaaacaagaaaaaatttggggaagaaaaaaatacttcaatatttcttatggtatgccttcattaacccggggtaatggcttagaaaaattaaatagtgattttgctgtggctataaaccgagggaatacttattatttgcacaaaaagcctcttttcggaatgttgaaattcggattggattggacagtcttcgatatagcagcagcaaaatataccgtagaagaaagtgattttgaagacggcggagatatttataaagctgaaatcggaatgcagtttggtccttctatcacgattaatccggtcgatttcttaaaaataaacgtatatttccgttatgatccgactttctccgtcgcatataatcaagacagtgatttcctgatgaactatggatcttattttaatacaggtttagcagcttcatacaaagttatatctcttggtgctgaatatcgttggggtacgacttcgtataagatagatgaagaaaatcaagattggaaagtatcaggcgcatacctatatgttagtttccgattctaatctgtataatttattatagaggcacagccgataggattccttcttatcggctgtgaatttttcgaacaatttgccaatatatagattttatatctgtatcttgggcagatatagcaaaactaccggtctctatgcggcaattgatacagggagtacaaataacttcatcttgaaaaacaaatccaattcgtttccctatcgaatgctctgttgcgtctgcccacttttctacacaatcagcagctacatggcccgtaatttgatatatgaacttaccttttaagttttctgccgaatctaattttatttcttcaaaatcattaatagttacgataggttctaaagaaatactgtcttctacacgatcggtgatataataccacccatttggtcgctcgttttttttcggattgcagacactcaacaaaaagagagataaaggaatacaaataaacctattcatcatacaaattgtaatcgaggtaaaagtacgtaaaacttggtttacaccaaagcataaaattacatttagtacaaatgtactatatttctctgaatagctttacctcgtatttcaaattattggcaaaacaatttagagataaagaatgtttaaaaataaactgacattttatagccagctttatactcataataacaaagatatcttgttaatattaaaaaattaagtatatttgaattctgacaattataaatgcatttctttttatactttattcccatctcaattaaacataacaaaaaaatgaaaaaattactttctttatggataacggttgttatcattctatttcaagttcatgtctcagaagcttgtaccggcattactttaacaacaaaagataattctatgattcttgcccgaacaatcgaatggggcggcagcgatttaaatagccaatatgttgtcgttcctcgtggttacgaacagtattcctatattcccggaggagagcgatcgggaatgaaatttacagctcgttacggttatatcgggttatccgtcgaacaaaaggaatttgtggcagagggactaaacgaggctggactatctgccggattattttattttcccggatatggtcgatatgaagactatgattccaaactgaaagattccagtatagccgatttacagttagtatcatggatattgggaaacttttcaacggtagacgaagctatgaaagctataaaaaagatacacatcgtgccgattgacccgagagcctcaaccgttcattggagaatggcagatattacaggaaagcaaatcgtattggagattgttgatggtcaacctaatttctatgaaaatacattaggaatacttaccaattctcccggttttgaatggcacatgaccaatctgaataattacatcaatctttattccgggactactaatccgaggacactcggaaatataaaactttcctcatttggtgcaggcagtggtttcctcggcattcccggtgatgtcactcccccatcaagattcatacgtgccgctttttaccagacttcttctccacaaaaagaaacagcgatagaagctgttatacagagctttcacattttgaacaactttgatatatctatcggtatagagttttctgaaagtgaaacgcctaccgatataccgagtgccacacaatggacatcatcgacagatcttacacacagagttatctattatcgtactatgtataatagcgacattcgttgcatagacttgaaagccatcgattttaatcgtgtaaaatatcaagcggttccactcgatttgataaaacagcaacctatacagccggtacaaatcaattgatcaatactcggtatactttgtaaatgtaatcacaaaaagaccgtatctatcataacgatatggtcttttttcattttggaaatatcgcctttatatttaaatttaataattaattataaatcaaacaattatataaatttcaaactatggtattttaattgcaaagtataaaacgaaaactctgtaatagagacatgtgagaaatggaaaagcagaaaatggatcgtaaaaaagaaaaattcaaaatcttgaaattcggaggaacttcattaggaaccgtcgagagaatcaaacatgtagcaaatcttatttgtaataatgagttgaatctggtcgtactatcggcaatgtcgggcacgaccaattcattggcagaaatagcctcattactatttaatggagatatcgacggtgcacaacgtgacattgagtgtttgaaaagcaagtatatcgaagtcgccgataagctctatctttctgcaaagagcatagaagaagctaaaaagtttattctgtgctctttttcatcgttacaaacaatagctcaatctcccatttcttcaaaacaagaaaaaattatactgtcacagggcgaattactgataactcgactgatgcatatttatttgaaagaaattggaatcgtatcggttctgcttcctgcgattgagttcatgcgtaccgacagaaacggagagcccgatatacactttatcaaaagaaatgtatgcaaattattaaaacgctatcccaataatcgtttgtttattacgcaaggttatatttgtcgtaacgtatccggtgaaatagacaacctacaacgaggcggtagcgattatactgcatcattattgggttcagccttgaatgcatgtgagatacaaatatggaccgacatagacggactacacaacaacgacccaagagtagtatcgacaacagcaccagtgcgtactctgacttttgacgaagcctccaaactcgcttatttcggtgcaaagattttgcatccgacatgtatccttccggccaaattaaaaaatatccctgtaaggttactcaacactatgaatccccaagctccgggaacgcttatttccgatactgccgacaccgggaaaataaaggctgttgcagccaaagataacgtaacttatattaagttgcgctctcattataaaataccgtgttaccgtttcctcgaaaaaatatttcactgctttgcacaatcccatacacctatcgatttggtcgtaacgtctaatgtggaaatatctttatcaatcgacaataagatacatttgccgaaaataatctctatgctggaacgatatgccgatgtttcggtcgaagatgatatggtaattatttgtgttgtgggtgatctgaaatggtataatgtgggctttgaacatcaaatagtcgaagccttaaaagatattcctgtacgaatgatctcttacggagataactgcgatgtgtcgttcgttatgcgtcgtgatgataaaaagcgagctttggaagcacttagtcaacgtgtcttttcttaataaatagcaaaataaccctgttaaaacgggtgataaagtcagacaaaaaaggtcattcattttcagaatgacctttttcttataaaaataattttaattctactaatttacatctttcactcccgcaagttccgggtcaatcataatacgtccgcaatattcacaaacgataattttcttacgcattttgatatcgagctgtctttgaggtggaatacgattgaaacaccctccacaagaatcgcgttgaatataaaccactgccaaaccattgcgtgcgttcttacgaattctcttaaatgcagacaacaaacgaggctccactttattttcaagtttcttggccttttccctcagcttttcttcatcttgtttggtctccgaaacaatttcatcaagttcgcttttcttttcgttcaaaatatgctggcgatcctgtaaaatctcctccgaagctgcgacttcattactcttggcctcttgtgctgcgataaattcattgatacgtttttcgcacaattgaatttcaagcgtttgatattcgatttctttcgacagaaaatcaaattctcgattattccgcacgttatcctgctgcttagtatatttctctataagcgtttgggcattttgtatttctacttttttagccgacacagcagctttaaggtcttctatttctgtatgaaagtttttgatacgagtttcaagacctgcaatttcatcttcaaggtcttgaacttcaagaggaagctcacctctcaatgtttttattctatcgatttccgaaagaatggtttgcaaatcatacagtgttttcaacttctcctccactgtatattctttctctgcttttgttttgtcagtagccatactttacaaataatttatcggatttgtatctacctgtgtagaatggattgcaaaggtagggaattttttttgaattatctcacaaaaaatttcttttgtatattgttcgctctcataatgaccgatttcggccaatagtatatgagattcaaattcgaaatagtcgtgataacgaatctctcctgtaacaaacatatcggctccggctatgacagcttttgtcatcaatgaggctccggctcctccacataatgctattcgtgaaatttttcggttatgcaacggagaatgttttacgcaaccggccttaaaaatttctttcagcttttccaagaccaacacttcatcgacaggttccggtaaggctcctacaacaccgctcccgacttgttcccatcggttggataacggaatcaaatcgaatgccggttcttcatacgggtggctccttttcagcgcatcgataaccgcttcttgtacatgtataggaactatcacttccaagcgcgtctcttgttcccggtgaaactcccctatcgtaccgcaatatggattagcataggttcccgcacgaaacgtccctgtcccttcttgtccgaaactgcacttatcatagttccctatatgaccggctcctgcttcaaaaagagcgtttcttacgctctcgacatgagtcgaaggtacataggtaaccaattttatcagtcggccgcataacgggtctaaaactcgaatcgaggtcaatcccagtttccgagccattctgtaagataccccctccggggcattgtcgagattggtatgggctgcataaatggctatgttgtgttgaatagctttaatgacaatcctctcgacataactattccccgttatcgatttcaatcccttgaagagtaaaggatggtgagatacaatcaaattatatcccatagagatagcttcgtcgactacggcttccgtgacatcgagacaaacaaccgcacccgaaaccgattgaaaccgaccgcccacttgcaatcctgcattatcataggattcttgccaattcaatggagcgaccgattctatcgcctttatgatatcgttaactattatcacgaatctctaattcttcgggttcacttttatacatagttcttctaactgggattccgccaaaatagaaggtgcattaagcataacatctcgaccggaattgtttttggggaatgcgatgcagtctcgtatagaatctaatccggcgaacatcgagactagacgatccaaaccgaacgccaaacctccgtgaggcggtgctccatacttgaatgcattgattaagaaaccaaactgatccaatgcttgctcttcggtaaatcccagcaaacggaacatatggtcttgcaattcactgtcgtgtatacggatagacccgccacccaattcgacaccgttgataaccatgtcgtaagcgttcgctctgacggctccggtatcgctatccaatagaggaatatcttccgctttcggggaagtaaacgggtgatgcatggcatagaagcgctgggtctcctcgtcccattcgaacaagggaaaatcgataacccacaagggtgcaaacgtatctttatcccgcaaccccaaacgagagcccatttccagccgcagctcacaaagagccttacgggttttcatcgcaggaccagctaatatcaacaacaggtcgcccggttttgcaccgaatctttcgccccactttttcaaatcgtctgccgaataaaatttgtcgaccgatgactttggcgtgccgttttcatcgaaacggacatagaccaaccctttggctcctatttgtggacgtttgacgaactcggtcaattcatcgagttgcttacgggtatatgtcgcacacccttcggcacagataccgcccacatactcggcactatcgaacaccacaaaattatgtccttcggttaaatctttcatttcaacgaatttcataccgaagcgcatatcgggtttatcgctgccatagtatttcatggcgtcggcccatgtcatacgcaaaaacggttcgttgaactcaatgccacgaatctttttgaacaggtgtttaatcataccttcaaaaatattcaaaacatcttcttgctcgacaaaagacatttcacagtctatctgagtaaactcgggctgacggtctgcccgtaaatcctcgtcacgaaaacatttcacgatttggaaataacggtcgaatcccgataccatcaataactgtttcaatgtttggggcgattgagggagcgcgtaaaactctcccggattcattcttgaaggcactacaaaatcacgagccccttcgggagtagacttgatcaacaccggagtctccacctccaagaaatttaattcgtcgagataacggcggacttcgaatgccatcttgtgacgtaattcgagattacggcgtactaccgatcgtctcaaatcgagataacgatactgcatgcgaatatcgtctcctccgtccgattcgtcttcgatagtaaaaggcggtgtctctgcggtatgcaacacgaccaaattttcggctatgatttctatttcaccggtcggcagattggtatttttgcttgaccgttccgttaccgtaccggttacctgtatgacatactcacgccccaatttattcgctttatcgcataaatcggcatctgtttcttgattaaagaccaactgtgtgataccatatctgtctcgcagatcgacaaatgtcattccgcccattttgcgactgcgttgtacccaccctgccaacgttaccttttggccgacatggttcaaccgcaattctccgcacgtattcgttctatacattattatatgatttattttcgttgattatactccgacattcttatgaaaaattatctttgcaaaattaaaataaaacatcggtaaacaaatatgattccttaaagaatttgataaaaatatgggagcatagttgtggatataaaaaaaagctgtaaatttgcagcaccaaaatcgagaaacgattaatgggattcggggtgtagcgcagtccggttagcgcacctgctttgggagcagggggtcgtgggttcgaatcccgctaccccgacaaaatataaacactgattatcaaatgattttcagtgttttttctttatatatttcatcaaaaaatatactttcaatcgatagacgtttcgtatatttttgttgtgcttaggtgcgttttgtttcaaaaccgtgcaaattccgtgcaaaaaaacttggcaaatatggcttctacaaatcgtacttagacacacatcaaaaaagaaagattgaatatcactactcaaatagagactaaaccatcggaataaacatgtaattcaaaactcctgcccgctattttcttccattttataaaatatacaaagcccacgtttacaatctcttataaaagaagaaaaataaaataatttagattagtaaaaattctaggattattttataaaataatcaaaaacaaatcgctatatttgtatcatacagtgaataaattcgtggtggcgattgccatttcggttggtttgacataggcctccgatccataataaaatgcaaatagagttttgcatttcacgaatttattcactgttctttttagtatcgtgtattatggtcggaggcttttatataaaaaagttatgactaaaattaaattgtttcaacttagattatttagaacaattcgccgtcaaatttgttcaatagacatgattgatatagaaacatttacaaatatattccgattgctcaaccacgttgaccggtcaatcattgaaaaatatatacaaggatattctataaaatctattgcagatgaatccgaatattccaaagcatttgtgtccgaaagaatctatgtattccagaacgaattaaaaaaagaaatttccaaaaaacagagtaaagttaagaattaaaataaatctgtcctatttttttcttatcaagttcataaaaagcgtattaaagccttttcttaccgatttgcgacccagaaaataaaaacgaatcgtgcattccgttccttctactgtcgtattatcgaccgtcatgatacatgaatcgacaaggggaataaattgttttcgaaaaacataaaaaaagaaaggttacccgatatcacatcggataacctttcgagagaggcagtcttttcagactgttattaacctgaaacaatcttctttatttcttgaacatcttctggctacgtaccacattgcctttctgcatcttcactacatacatagcagaagacagatcggagacattcacagattcgggattgttgtttacatatttaaccaactgtccatcgaccgtatatatccaagccttatctacattgttgaaatagattacatcggtagctaccgtaggatacagcgaagaaacagacgatacaccgttgccgttgccatttacgacatcttcgattccagatacatctaatccatcgggttcatcggcaataccttgatcacggtagtcggcatatgttttttccggttcacgtccgggattcgatccggttacttccacatcgaaatcgatcgagaatccttttgccgtacctcccgtaggtccggggtgagtaaaccaagcatcagagaataccatacggaaacgacttgtacccactgccgcatcctcgggaacattaagaatgaaggtacaacctgttgcgatagaatcggttcctgcatttaacgtacctacctccattactaattcgtctgtactagcatcgaatacataatcgagattccaatctacataggctttacccaaacaccacttcaaaccatcgtcgctaccgttaactcgtcctgcaaacttaaccgttactttctggccttgttctactttcagtttttggtcagttactctcaaatagttatcacctccaacaggtgtattcgatgtatagttcaaattttcagttgcacccgtagtaacaagcgatgaaacataacgatatttttgagctgtctcaacaccttccgattcgagattcaaataagtttttccatacaaatcggtatcgggctcgggtaaagaccccgtggcacgcggtacatgcgtccacaccaccggagaatacgatttcaaatcgactgataccgaacgaacaccgatatagggatcgtcgttttcatcttcaaattgaatattacctacataagccgaccaagtggaagtacgtcctacttccgatactcgtccgtcttctccattcttatacaaaatttcaaaatgatcgatatttacctcgtcgttgtaaaccataccataatctttgcggacaggactaaatccagtataatcgacactccaagtcaattttacagacatcgaagaagtcgtttcttccttcacttctgtaactacactcaaatcgtcgatatcagcgggtttcatagcagagcggtcatcgcataattgcaactgtcctacgagcattttatagctgtccgatgccgaacctttcacacgcagaccgatatattcgattacatcgttttggttgataccgctgagagctatttctttttcttcccaagtagcgcctttcaagtcgcccacagggaattccaaccatgcactgtcatcaaatttcttcaagatgagatatagattggaagcattacttccctcgatacccgatttcacggccagtttggctgttgcattattcccagaaacagtcagtttggcacgataaagcactacatcagatcccgtcgaagtaggagttcctttcaaacggagggcagatccaccgatataagcatcctcatgagtaaattcagcatcgatatccgtcgaacggttcgttgtccccgtttgatagattaaccaacgataggtcggtacatagtcttgttgtcccatgttgtaccagctacccagtgtttttttacctttataagcatagaaatctccatttcccaatgagaaataggtattgaacggcagatcgccttgaatagccgtacgttccggtataaattcggccaatccgcagaattcggctaattgcgtatctgcttcactggcattttctacttggaatacattagtataggaaggagccggacgttggatcggtgtgcgatacccccccgagaatcctttttccaacaacttttgatagttcgtttgcatatccatggggtcttttcccaccacatattggaagaaacgactgattttgtgctctccccaaaggcaaagaccacatctcttcgtcgcttcatcttgattcaagagaggccagctaagatccatgtgacgataccaaccaccggcatataaaccgtcggccgtaccgtaagcagtttctgccgcttgaaccgacgaagccatatattgtgttgcaaaatctcctcccgaataattcaacattaagtcagcggttttaccgttcgcttttgttccataaagggcatttgcagtacgtgtcgaaagtgaagaactactggtgtacaaaccaatatggaaactgtcgaaccctatctctttcgctcttttgtaaagcgcttgatggaatccgacaacgtcagtctgctgatagcccgaatcctcgaaattgtagtttataccgtccaatcccaagaacaaaagagcattcaaaaaggcatctacatacacgtattctcctttctcgtttttctttgtaataagcttgatatactcacttgaagttgttccccaagactcgaaaaacttaatacccgagaacatgtgcgtcccattcttgtgagcggcatcggcccaagaacccggagcttgtaatatagtgtggttccaagcaccgtataaattcgtatagttccacatagagaatacatcgctatggaattcggagctgggatagccaccgacactttcaccttgtccggtcggtgtgttcatccacaaccgacgggtgggatatacatcggcaacaatgtttttggctgcatcttccataataactgccgggcgtacgtgcgaacgggagaattccagatcgagattaaaaccggcagcttcaaactcttctttggtcgggtacttacgtccttcatcagccgcctgagcgaataacagcaataacttgtcatcattccacggtgtaaagtcaaaaacttctgtcgatgcagacgccggatattccggttcttgcgcctgcacgttgccggccagacagcatagagccacagccgcaccgcatacagtaaactttttcatgataaaaaaaacattaaattataaattttgtaactattataaatagtagagagaagaggagcgacagctcccctgccctctaaaccatttcattagaaattggaaccttctacgtcccaccaaacacgagtaccttgtgtatcggtcccccccaaagcctctataccagaggtctgaatatcggacaaacctgcactcgtgtcccttcccggcaaaggaattttccgaataaggtcgccttgtaccaaactgccgtcaccgtcctcgacattcaatacggggaatatcttcggatagcccgtacggcgcaaatcgttccatgcttcataggaataggggaacccggcaatatacttctgagtgatgattttttccaatttggtttccggcgtatcgccttcgttccatttaacaccgattttggttacactggctatatcattggtatggtccatcgggtcggtatacgcataagcgaccggttcttccacactcatatactcatcgactttctctccatattgcgaatttgtacgttgatccaactgagcgctacgaatgcctgcttcataaaaagattgggcagaaccacccatcgcccagttacgcactgcaccttccgcacgaaggaactgaacttctgaaagtttcatcaggtataacggagccatactgatacgattggaagaaactgccgaataagcgatacgggggttaacactcactgtttgacccgaaaccatggatataccagctcgtagccctacaatccgagaattggtaggttctatttcctcaggatttgtttcattgacaatctgagaagaatttttctcgaacaacgcataatcgtcttgtacataaggatgcttcaaactgaacagtaagctctcaaacgaagcattcaaccgggaatcgccccataatttgctaatatcgaccaatggatgggtaaaccctgaaacgactggatccaaagctatttcttgattttccgtttcgattacaccttcggtaacagcttcttgtgcccatttttgagcttttgtccgatcaactttcacaatatgcatagccatacgaagttttaacgaattggcaaaacgcctccacgtgtcaatactaaaatctttcgttacccagtcactttgttgcaagataccattcaaacgacttttgtaccaccccggacgttgctcataatgtttcaaacaagcattgatcgtatccagattatctacgatagtttcataaatatcggccatcttattgaaggtaaatggattcgtttccttattattcttgtggtccacataggggatagagccatacaggtcgaccatctcctgtgccgaataattgtaaagcaatagtcctatcgctttcatctcggggatagagtcgatatgagggtgattcaacatgttcaccaaattgtttttcaccatgagaaaagcaccataagggccatcgcaatatcctcgattgtaatagtaagtagaagataaaataccgtctcccccatgtgagaagttatgaggaacgcataaatagccggcatagttatcgacggttatattatacacatattgatattggtgagctccgggaagctggccttcttttcctcctctcatacaatattgtaccgtttgtaattgaaagaaataattgtttaattctttctcggcaaacgcaaaaccttcttctgaaatctcttttctataatctatactatcggctttacctttgtagactatcggatccaattcggtatcaccaccagtaaaggtatcggtgggcatatcgaaatctaaacatgagtgcaagctcacaacagaaagcaatgcaccaaatgccgctaaaacagtttttttcatatatctattcattatttactactaaaaatcaattttcaaattcacaccgaccgaacgggttgccggcatattgaagatatcgaacgcacccaaaccgtttttggtagagagggcgatatcgggatcgaccggagcatccttatagatgaagaacaagttgcggcctacgactgacaacgagaggttactgataactcctccaaaaagattatggaaagaataacctaacgaaagttctgccagacggaaattggtggcatcataaacatattgcgaaccaaacatattaccacctactgctttgtaatattcttcaataggagccaaattaccgtctggcattaccatagccggctttccgttccattgtaaatcgggatttgcttcggctgccaaacgagcatctcccactcgcttagatacaccttgataatcgagataagcctcggtcaatgagatgaccttgccaccgatacgaccgctcaccaagaaataaagagaaaggtctttccaagaaatcgtatttccccatcccaattggaatttagaattcatattgcccaagtagacataactattgttacttaactgaggtgctccgttagaacttaaataaatactaccatcgtcattgcgacgaaaatcgagggcatacatatcgccgtaagaaccgccttcgtcgtaccttaccacaatattaccaccggcaattttttgttcgagcttagacgactttccttgctcatctttgaatgtctttacaatcttgttgtcgttgtacgagaaattcaccgaagtacgccacatccaatctttggcaaagcccaacgaataggaaacggtggtttcgataccttgattacgaatcaaaccggtatttacaggtttggacttacctcccgtagtagcttgtaggaaatagttattatacaatcccgtgtgataatacgtcaaatcccagttcaacgaactatcgaagaacgatacatcgaatccggcttcgaatgattttgaagtttcgggaataggattatcgaaatagccataggtagacgaagcgatcgctccggttgctaaatcagctttacctttattaaacacctcattaggaatagagttacctacttcggagtaagaagcacggagtttcaagtgtgtaataaattcgggcaaagaaatgtagcgatgcattaacgtattggctccgaccgagaaatagccataattatcgggagtaccccgatattcgaattgtttgaaagcccgataccagtcttggcgatagctaccttccaaatagacataatctttgtatcctacttgtcccgtaaagaaaagacctttatcccagttggaagacaaggaatactcattcatattgcttcctccccatgacgccagaggctcaaagaagttaatacgggtcggtagctgattcatgtcggtataggagaaataggtggctctcgtccacaacttttgggtctctcctttaacggtgtgtcccacccaaccggccgatgccgatacagagaaatctttgatttccttgttgtaactcaacatggcatcgacatagacatcgttgctccaaatgagatcctgtccatacataccatagtcctcgatagcggctacgttttgcgtagtggccattctctttgtaaatcctttatacttggcacggtccatgttcaaacggccttgtatcttcaagccgggaatgatttcatagcttgccgtaatatatccataggctctttcctcctcggtctgtcctttattggcattcgttatccaatagggattattgttacccggtgaaaaataggcccattgttgcatcggtccagataactcaatagtaccatcgggaacccactgtttctgatcattataatatccgtagatgtttgaagtccacgtgccttctcctcgataatttttcttataataatccatatcgatgttacgcggcatacgatacaaatcatataacgggttcatgaccgtacctccgcccggacgattctttgtctgcgcatgcacatagttcaatgacaaatcgacattcaacttcttgttgaacaaagaataactctgacggaatgaaaaagtatttcgttgataagtattattgggaaccataccgtcggcgtaggagttggcataagagaaataggaacgtactttctcagtaccaccacttaccgataccgagttgttgtaagtcgcacctgtctcgaaaaagtcggaaatatcgtcttttgcataattacgcaacttagctccactgtaattgagctcctcgggtgtcatttcagaaatctttttgccccaactttcagtagtaagagtactggctgccagatttacatttgcaccatatacattctgtatctgaggaagtaccaacggattttcaaaagtcacattagaattgacacttaccgatacacgaccctctttacctttcttggtcgtaatcataagcacgccgttggccgcagcactaccgtaaagagcagccgcattagcacccttcaaaatgttgatgctctcgatatcgtcgggattaatcaaggaaagagcatccccaccctccgaagaactcgaataagtgaggctctcgccaccagcccaagaagaagccgctccaccgacttggttagtcataggtataccgtcgataacgatcaaggggctgttgttacccataaccgacttattaccacgcaaaaggatttttgaagtaccaccggctccaccggcactttgagtgatagttacaccggctgctttcccttgaagcgagttcacgaagttggcatcttgcaccttcattaaatcatctcccttaatttcttgggtcgcataggtcaaagacgattctttacgggtgatacccatggcggttacaacgacttcgtcgagcacctcggaattgtcctgcataactacatctatcttgctctgcccgttgatagcgcgcttgatggtttgataaccgatgtaggaaaactccaattcgttactccccgcaggaaccttgatcgagtagttaccatcgagatctgtcgctacggccacatttgtaccggaaacttttaccgtgaggccgataagagtctctcccgacggatcggtaactgtacccgttaccacttttgtccccgtggcaacattttgatttacactcttcgattgtgccgctccttgtggcgacatcgtatcagctgcgctgacatgcgcagcagtaccgattccaaaaccagaaaccagtacgaaagctacaataattgcttttagatttcttctatacatacgtgtattataggtattcgaatactaaaaaaataattctcctctctcattttaattctaaaaaatagtctctcttatttccataggctaatgttttttatattaaaaatggataaacttcaaaatgcttcctataaactgcgacgtagtcgggattctgataaaacgacatgcctcaccattcgtaaatgatacttcaaactatcaaaaaaaacagatatgtactttttcatggatcctttaatgttttttcatgaatcaataagtatctctataatttttttgttatatattatataaccccaaatcaaaaacaatccctagtgaaaaatggaattttttttttgctcccttgaagaaaatagtagtagaaccaattggagcaagtatatatctatttggtttataaacaaatacaaatcactccaaagattacactttttagaaactatctatgattccctcccaaacagcatttcttatttattatcggaatccctatccggcacagaaccgtccccttccgcattatgtttaatatctaaatattgtcacaaaaaaggcgtatttgaagaaaaaagagtacttttgcggactattccattctcatatcaggattattgtgtatttactccaaaaagtttcttgactttatgataaaaatttcatttgaaaatattcgacaagccgctaaaaatatcggcaactacgctttacggcttagtgaaaagattcgtcgtatttctccccgggtatggttgtatgtgggggcaggtattctcctattaagcggaggattatattggttactgcgtcccgcacctccgggtcccgacctaccgatagtcgaagtcgagcctgttgttacggacgatgtggaaatttacggggaatatgtaggccgcattcgtgctcagcaattcgttgaaataagggcccgggtagaagggttccttgaaaaaatgcttttcgacgagggtacttatgtaaaaaaaggacaacccctttttataatcgaccccaaacagtatcaagctcgagcaaataaagctaaagctcagctaaacaaaaacaaagcgttggcattgaaagccgagagagacttggagcgcatcagacctttgtatcaacaaaatgcagccagccaactcgatttagataacgccatcgcttcttatgaaagtgcaaaagccgaagtagagatgagcgaggccgatttaacccaagccgaaacagcattgggttatacgactgtgagctcccctatctcgggatatatatcggaacgtaacgtcgatataggaacacttgtcggccccggcgggcaatcgttactggctacggttgtaaagagcgataccgttcgtgtcgatttcagtatgaccggactcgattatttgaaaagcaaagcccgtaacgttaatttagggcaaaaagacacgacccgaacgtgggagccttacattactattactttacccgacaattcgccttatcctcagcggggaatagttgattttgccgatccacaagtcgatcctcaaaccggtacattctcagtaagagccgaaatgcccaaccccgaacatatattattaccggggcagttcaccaaagtaaggttactgctcgatgttcgggaagcggcagtcgtagtccccaataaagcaatcgcgattgaaaaggggggcgcttacatattcgtcgtaagagccgatagtattgcagaaaggcgtatggtcgaattgggaccggaagtaggaaacaatgtcattatcgaacgaggtttggttccccacgaaaatatagtggtcgaaggatttcataaactcactcatggagataaagttatcccctcgacttatcgggctgaacaagaagaccattctaaaaattagtatgttatgaaatcggacttctttatcgacagacccatattttcaattgttatttcaattgttatcgttatcgtcggtgtattaggtctttttttactcccgatagaccagtacccccaaattgttcctccggtagtcaaagtatcggcctcttatccgggagctagcgcacagacggtcacccaagctgtcgccactcccatcgagcaggaattgaatggtacgcccggcatgctttacatggaatcaacgaacagcaattcaggaagtttttcggcaacaatcacattcgacatatcgaccgacccggatttagcagccgttgagatacaaaaccgcgtgaaacaggccgaagctcgtctcccagccgaagtagtacaaaacggaatttccgtggaaaaacaggcttccagtcgattaatgactgtcactttacgctctaacgatccgaaattcgacgaaatatacctcagtaattatgccacgctcaatgtgttggacatgttgagacgggtcaaaggagtgggtagcgtatcgaatgtcggtagccgttattacgctatgcagatatgggttcaacccgaccgcttggctaatctgggacttacagtggacgatttacaaaaggcattgaaagaccagaatcgggaatcggccgccggagtattgggtcagcaaccgatttccgacatcgatataacgactcctatcatagcacaagggcgattatcttccgtaggagaatttgaggacattgtcatacgggctaatcccgacggttctttgattcgtttgcgcgatgtcgctcgcatctctctcgaagcacaatcttacaacacggaaagcggaataaacggaggtaatgcggccgtgcttaatatcaacatgctaccgggagccaacgcaatggaggtcgctgaatctgtgaagaaagagatggaggagattagtcgtaacttcccggagggtattacttatgaaattcccttcgatatgacctcttatatttcccaatccataaacgaggtttaccatacgcttttcgaagccctgattttggttatcttggttgtatttctctcgctacaaaattggagagctacacttatcccggttatagctgtacctatttcgttgataggaacattcggaatcatgcttgcgttcggattctcactcaatatgatgacccttttgggtttaatccttgctatcggaatcgtggtcgacgatgccatagtcgtagtcgagaatgtagaacgaatcatgaatgaggaacatcttagtccctacgaagctaccaaaaaagccatgcaaggattgggtagtgccattatcgctacctcgttggtgttatgtgccgtattcgtcccggtcagctttttggccggtattacaggtcaattgtaccgtcaattcacgattactattgccgtttcggtccttatttcgacattagtcgcactaactttgagtcccgccatgtgtgctttactgctcaaaccggattcaggcaaaaagaaaaacaaactttttcgttacataaacttatggttagcacgaggcaatagactttacgagaaactcattcgaaaaggattgaagcatgctcgtagagtagtagcagctttcggtatatctctgatagcgatatgggttcttaacgaaatagttcctcaaagttttatgccacaggaagatcaagggtattttaccgttgagttagaattaccggaaggcgctacattggaaaggacacgccatgtaactgaacgagccatgaactatttaatgtctcgtgaagacgtagagtatatactcaatgtgacaggatctagtccccgtgtcggtacgaaccaatctcgaagtcaattaacggtcattctaaaaccctgggaagatcgcaaatcgtcgaatctccgagatattatggaggaaattcgtgaagaattaaaaaaatatcccgaaagtaaagtttatttgagtactcctcccgttattccgggattaggtagttcgggcggtttcgaaatggtgctcgaagcacgaagcgatgcgagttatgccgatttacaacgagccgccgacacattactttattatgcctctcaacgaaaagagataagcggtttatcgtcttctattcaaaacgatatacctcagctttattttgatgtagatcgggacaaggcccaaatgctcggagtaaaaatagccgatattttttctacgctcaaaacatttacggggtcgatctatgtgaacgatttcaatatgttcaacagaatctaccgtgtatatatccaagccgaagcaccgtatagagcacataaagataatttggggctcttcttcgtcaaaggaagcaataacgccatgatacctattaccgctcttggtacaacctcgtatacaacaggtccggggactattcgtcggttcaatatgttcacctccacaactatatcgggagaagcggccccgggttatagttcgggacaagcgatggctatactcgaagaaatagcaagcaagcatttgcctaaaaacattggcgtcgaatggagcggactttcctatcaggaaaaacatgtaagtggtcagacagcctacatattggccttagcattactttttgtcttcttattccttgcagctcaatacgaaagttggtctatcccaatagcagttatattatctcttccgatagcaggagtcggagcctatttaggaaactggatatgtggccttgaaaataatatttatttccaaatcggcttggttatgttggtgggattagtcgccaaaaatgcaattcttatcgtagaatttgccaaagacgaagttgagaaaggaaataatgcagtggatgctgtaatcaaagccgcacacttacgattccgacctatcgtaatgacctctttggcctttatattaggtatgttacctcttgtctttgccagcggtccgggatcggccagtcgtcaaggtatcggtacaggcgtatttttcggtatgattgtggcaattaccgtaggcattatttttgttccccttcttttcgtatgggtttacaagttaaaatctaaaatgatgaaacgatgaaacagatgaaagttttcatatatatattggtgacagcattcattttaagtagttgttctatacaaaaacgctgtcaggctcccgaactgaatttaccagatgaaattattgcaggagaaaacgatacattaaccattgccgatatgtcatggtgggaactctattccgattcgactcttagcaaattaattaaaaagacgttaagaaataatcggaatatgcaggccgcagaagctcatatcaggcaaatggaagaattataccgcgtgagtaaagcatctagttggccaactatcggagctcaacttttcgcagatcacgaaaccaatgattattacggtgaaaagttcacaaaagatcccgaatttagtcttaaagcctcattaggttgggaaatagacctatgggggagcctacgttggggaaaaagaaagggtgcggcggagtacttagcctccgtggaagctgcacgagccatgcaaatgaccctaattgccgaaacagcgaccgcctatttcgaattagttgcattggatcaagaacttgaaattgttttacaaaccgtaaaaactcgtgaagaaagtgtcaatcaagcccgattacgattcgaaggtggtctcacttccgagacagcttatcaacaagcacaagtagaactggccagtgcttcggctcttatccccgagttggagcaaaaaatcgcattgaaagaaaatcaaattgcggtattagccggagaatatccgtcgaaagtggaacgaggagaattcgacttaaatgtaagtttacccgaaaatatacctatcgggcttccctctaccctactgcaacgaaggcccgatgtgcgtcaagcagagcaacagctacaagctgctatggcggcagtagggattgcatatgccgatcggtttccacgattaactataagtttagtcggagggcttgaaaacgatgaattaaaaggttttttcgaatctccattctcctatgtgtctggcaatctcgtagctcctttattaacctttggaaagaagaaagcccaatataaagcgtcattggcagcctatgacgaaaaacgtttcgcctatgaacaaaaggttcttgaagttttccgagaagtaaatgatgccgtgataacttatcagaaaaaaagacgaacatcggaacttcaactcaatctttttgaagcagctcaaaagtatgtagatctagcacaattacaatatttcaacggagttattcgttacatcgatgttttagatgcccatcgaaattttttcgatgctcaaatcggtttgagtaatgctgtaagagacgagtatcttgctatggtgaatttgtataaagtattaggtggcggctggggaacaaacccaatttaagcgagcaaatttttctataaataaatagatagagccggggattataatccccggctctatctatttatatccattttttatcagcaaagtttgcgtgccccatcggcaatcacgacatcataaactttgggaagacgaccgaattttgtcttatattctgctttggctttttccacgaacgcatcatacaattcgtccttaactaagtttatcgtacaaccgccaaatccacctcccatcacacgagagccggtcacaccacactctttggcaatatcattcaggaaatcgagttcttcacaacttacctcatacaatttactcattccatgatgagtctcatacatcttctgccctactgtctcataatctccttgttcaagagcatcgcatacgtcaaggactcgttgcacttcaccgatcacatattctgcacgcatataatcctcggcagacacctcttcttttacctcgtctaacatagacatattggcatctctcaggaactctacatgcgggtgtttcttttgtatggcggcaaccacattctcgcacgatttgcgtcggtcgttataagcggaagatgccaactcatgctttacgacagaatcgagcaatacgagtcggtaaccttcgggcttgaacgggaaatattgatattccaacgaacggcaatccagtcgtatcagatgaccggctttaccgaacaccgaagcaaattggtccataataccgcaatttacaccacaatagttatgctcggtagcctgtccgattttagccaattcgaatttgtcgatgccacagttgaacatatcgttcaaagcgaaagcataagtactctccaatgcagccgacgaagacatacctgcacccagaggaacatcgccggcaaatgctgtattaaatccggctattttaccgcctcgtttaataatctctcggcacacaccgaatatataacgagcccagctggcacggggagcgtcttcctcgttcaatccaaactctacataatcttttaaatctatcgaatatgcgcggactttatccgtcccattaattttaagttctgcaaccattcctttatcgatagctcccggaaatacaaatccaccattgtaatctgtatgctctcctattaagtttatacgaccgggagaggcatataccgacccggtagagccatcaaaatgtttgataaaacgacttcttacaaattctatatccataatactaaattaaataattgtataacttatatgattatttctctcgaaccgaaaatttaaactgtgtatgactttcgaatttttcatgagggcgtaagataacagaaggatagttttcatgattagggctatctggaaaatgttgagtttcgagacagatagcagctctcatcggataccgtttcccatttttcccgataaaattccctgtcatccaattggctgtataaagctgtacaccgggctctgtcgtaaagacgtccatcacgatcccggttttgggcgaaacacactctgcacaaaatgaaaattcaccgctccgcttcttattcaaaatataagtatgatcgtaaccttttccataaaccagttgttcaaacggctcgtttatacggctaccgacttcataaagtttacgaaaatccatcggggttccctctaccgccgacttctctccgtaaggtatagccgtatcatcagtaggtaaatagtaatcggcatcaatgcataacagatgatcaccgatgtaaggatctcccgcacccgacaaattaaaatacgaatggtttgtcagattaacgatggtaggtttatcggtttctgcatagtaagttatatcaacggcgttatcgtcggttaatttaaatatgaccttcacttgcagatttccgggaaacccttcttcaccatcaggagacaatcgggaaaattctattgtttgtttatccaattgattggcatcccaaacatgaaagttgaagccttttacccctccatgcagactgttaggcccattgtttatcgctaatttatcatacaaaactctatcgaccgtgaattttccttttgcaatacgattggcatatctaccacaagtcgctccaaaataaggctcctccgatgtaaggtattcctgtatgttattatgccccgtaaccacgtctatcatcttcccatttttatcgggaaccattaacgaaacgatacgagcgccataattagttagggtcaattcgcacccgtttttattaaccaagatatagagaccggtttgtttaccatcgactaagccttgaaaatgtgttggattcaatcctgaaagagtcatatccatattcttctttttaaggttaactaaatttgttgattgtgtaaagttaacgttatctttttttcttgcaaagatttttttatggttttgcataaaattatcagagaagaaaaattttaacggatttttcactacatctctcctctcccgattcacctctgcatatcgatcgattcataaaactcgtgatgtaaatctgtatctgattaaacatacttattgaagtttgtcccactcacttttccttcgttcttaacacctctcatagacttgcacacaacctctaaatatctcggttcatattcataaaatccagcccggtgtttcgtcgagactttgccgatctggattttcacctatgtattcgataaatcccgtagaagagagtttattcttttatccttcattattatcttatattaataattttatgggtttgaagtgaaagcctccatcgggggtggctcttaatgtattcgatagctgcggtaagattgttttcattttttatctcgtcattgacatcacaaggttgcaagctacaaaaacactcataagctgtggcgattttttcatacagttccatatcttgtccctgataaacgactttgatttcattcatacgctgtattttcacgggaatcgttttaggagagcaagtaatccaatcgatcgaccgttccaaatcggtatctaatgcgattgatccgttggtttcgatttgaacaaatttcccgacttcatgcaaccgatcgacaagcgaatgcgtaagttgtaaagtgggttcccctcctgtaataactacatgtttcgcaggataatcagaaatagcctttacaatctcttcttctgtaaaaatagtataatcctcatgttttgtatcacagaaatcacaatgcaaattacaccccgctaacctcacaaaaatcgcagccgtacctgtaaacacaccttcaccctgtaatgagtaaaaaatttcatttactttcatctgtcaatattttcattttcaaaatcgtcgatttcgtaaatagccgtatttccaccactttcttgaactttggttttataacattcgggaatctgatccgtaatccatttcgctatgttttcggcggtcggattaaaaggcagcaattcattcagattcccatgatcaagataaccatgaatcttatctttaatgtgtttaaagtcacagaccataccgtcttgattcagttctttcgctttacaataaaccgtaataatccagttatggccatgtaatttttcacatttactttcatatgaaaggtgcaaagaatgcgcgcctgcaatttccattgtcttagctacgtaatacattataacttaaccgttttattcgttattaatcctcgtattctgtctgatcctcaatcccggcctctcgaagagcctctttgcgttctacacaagtaccgcatttcccgcaatgtttctcccctcctttgtaacaagaccacgtttcggcatagttcaaattcaactttttcccccgattggcaatttctgtttttgaaatatcggtatagggagcaaagatgccaatattctcataagttcccgaacgcatagctttatccatagcttggataaactccgatcgacaatcgggataaatagcgtgatctccgccatgattagcaatgagaacttgtttcaagccattgctttctgcaataccacaagcaactgataacataatgccattccgaaacgggacaaccgtacttttcatattttcatcggcataatgtccctccggtacagagtcgctaccgtccaacaacgaacttctgaaatattctttcataaacgcaagaggtattactatatgttttatttttaaccgctcgcaatgaatgcgagcaaacggtatttctttatgattatgattagctccataatcaaaagaaacagctaatgctatgcggtcggcacactcatacaacaaagtaatactatccataccgccagatactacgatcaacgaatctttcatattttctattcttatattcgattgcaaagataatgaaaggtaagagtaggataaaacggacaagttcgtttttcgtacctatttttgtatttctcacaaaggggggaacgtgcaaaaccaaagttgaaacacgctttattcaattatattcagtgcaacctgtaaagataaattaaatccatattcctcttataggatttcttgcgcaagccattaaaaaaattcatatctttgccaaaagcaaagataaaattgaatatcgcaatgaaagcaaaaacacgtgttcgcattatctttttttgtttaaccatctctgccataggcctccctttaatattgattagcacaccttctatccatcagcatttcgagccggaaaatatagccatatctttcgtcgaaaatctatccaacgctaacttccaagaagctaaaaagctatcgactcccgagtcggccgaaacactatatttgtttgagaccttagtcggaaatcaatccgatgaattaaaaaacacacccactcatttcaatatttcttattctgagatgaatacttcacaagataccctgttcgtacaagggaaattatttttctcacataaacacaaactcatacgaaaaattaatcttactttggttaaccgtagaggaaactggttggtcgattgtcgtgacaatactattttctgatattcacggaacgaatcgaaccaacagagccataccgctgttaaaatcatattcatcttattaaatttcaagacatgaacaaatttcaagatattatcgcaggtgataccccggttctagtagacttttttgcagaatggtgtggtccctgtaaaatgatgaaaccagtccttgaagaattgaaaaagaaaatggggaataaaatcattatactaaaaatagatatcgataaaaatatttccttgtcttcggagtatagaatacagtcagtccctacccttgtactatggaaacaaggcgaaatcatttggcgacaatctggcgccctgtcgttaaacgaattagaacaaattctatcgtcttatatacgatagtttcataagattgtcacttttttataactgaatacgaaaacaggttatacttcgatatacccaactaaacttgttcctgttccaaccttatattagtcctcaaaagattacgggtcgaaaagaaaaacgaacttattcgttttatctttctcttgccttgcactatctttgcaaaaatgcgaaaataggcggcactcggcataaccaaataaatttgtttctgccctcgtttgcactatctttgcagcgcattaaaaagaaactatgagatcgaatctgtatctgaaactattcatatcattttttaaaataggtgcgttcacattcggaggtggttgggctatgatacctctcattgaaagagaagtcgtggataaacaaaactggattaaacgggaagattttgtcgacgcacttgccattgcacaatcattgcccggagtgttggcagtgaatatatccatattgatcggaaacaaattgcgaggattaaaaggttgtctcatggcgacactcggtacaattctaccctcttttctaatcatcttggctattgcaatctggtttgttcaaacgtatgacaatccggtagtcgagcgtatattcaagggtataagaccagcagtggtcgcactcatcgtgtctccggtattcagtacggctaaaacagcacgtatcaatattaaaacggttattattcccattatagtggcattatcaatctggttaggagggatttcccccatttggttcgtcttgttaggagctatcggtggaatactttactgcaatcatgtcatcgccagttcaaaacaaaagagtaataaagaagaaaaatagccatgtggatcgtatatctcaacttattttgggcctacctaaaaatcggactattcggttttggtggcggatacgccatgctctcgctcattcaacacgaagcggtagaagtcgttcattatggcgaaagccaaccgtggcttaccccgaccgaatttaccgatatcgtagctatttctcaaatgactcccggtcccataggaataaacagcgctacttatgtaggatatgtagctgccggtaatagtatttgggggtcaataatcgccacattcgccgtatgtttgccgtctttcattttagtcttattagtgagccgttttatacttaaacataaagataacattactatcaaaagcatattttccggacttcgtcctgtggttgtcggtctgatagcttctgccgcactcctcctcatgaataaggaaaactttccagactatacaataagtatcggtattgcaataatctcatttgttctggtacactatgcgaaaatacaccctatactcgttatcgtattggctggtatttcaggatatgccttatactaaaatatgaattatgaattacgaagaaacattggaatatttatataaacaactacccgtttttcaacaaataggaagtgccgcttataaaccgggactacaaaataccgaagcgctggacaaatatttcggatatccccatcgaaagtttcacaccatacatgttgccgggaccaacggtaagggatcggtatcgcatctattagccgctattctgcaattaaacggatataaaactggattatatacctctccgcatcttatcgatttcagagaacgtatccgcatcaatggaaaaatgatttccaaagaagatgttattcaatttgcagagaaacaccttgcatctacactccatatccaaccatcatttttcgaactcaccatgatgatggcgtttaactactttgccgaaaatcaagtagatgtcgctgttatcgaagtcggattgggcggaagattggacagtacaaatatcattactcctgatttatgtgtcattaccaatatcagctatgaccatgtgcaaatgctcggagacaccctgccgaaaatagcccgagaaaaagcaggtattataaaatctggaataccggtcgtgatcggtgaagctcagggagaggtgaagcaagtattcatcgatcgagcaaaagagataaaagcccccattatattcgcagaggaacaaattcatttccggtcgacccaacgaaatgacaaaggttgggaattcgattctcccgaatttccgcaccttttcggggagttaagcgggctatgtcaggagaaaaatgcagctaccgttctgacagcagtcggccaattacgaaatttaggatacaatatctccgaccaatcggtctatgatgctttcgcccatgtcaccagccttaccggtttaatggggcgatggcaacaattggaatcgtctccccgactgatttgcgacaccggacacaacaccggaggcatacaatatatagttcgacagttgcaaaacgaatcttatcaaaacttgcgtattatcatcggtatggtcaatgacaaagacatttcgggagttttggctatgctcccccaaaatgccgtttactatttcacccgggcctcgatacctcgcgctttacacgaggaaagactgtacgaattagcaataaaagcaggattgacagggaagtgttatccgtcggttcaacaagctgtggaagcggcgaaaaaagaaagccgccccgatgatctgatcttcgtaggcggcagtacattcatcgtggccgacttgctaaaaactatgctttcacagcaataacctctatttcgactaatgcttgtttcggtaattctttaactgcaaacgccgaccgagacggaaatacggacccgaactgctcggcatatatttcgttcatttctccgaaaagagacatatcggccaacagcacggtcgtctttacaatatgttcgaccgaataaccggcctccgccaaaatagctttaatgttcgcaaacgattgacgagtttgagctttgatgccctcaggcattattccggttttggggtcgatgggcaattgccccgaaaggaaaatcatatttccggtttcaacagcttgactataaggtccgatagcagccggagcagatgtcgtagaaattacttttttcatatcactcattattatttaatttatgggaaagcactcggctttcttctattttcaaatctttcaatgcaatactatcacccttctcttccataagcctacgggtatctattatagccgcccattcctttgggaaatcggcttttaaattacagataaaatcctcgtctccttctctgtcgatggctcgcaataaatagcccaaagtcaatcggctgatgtctaccgccggttgatatgcaggaaccctctcttcctccgacaatgtctgcgaaataatattcacccgttccaattcatcgacggtacgctctaccaactgtatgggaatagcataacgtctcgatatctgtcctttggtcatcggaggaagtccctccttgaaccgatggacaataactgtggctatgactaatataatataatcggaataccgacgagatatatcgttggtttctttttcgaaattgaaatttactacattttgagatgagtaagtcaacacagcaccaaacagacaaatcaaccatgaaaattgcatccaaatgagcaacaacggcaaaaatgcgaaactcccgtaaatagcattatatttcgatacccaaatttggcccgaaatatatataaattgaaaaatctgaaataccgtaccacaaataagcccagaaataaacgcatatttgaacttaaccttcgtattgggtataaaaatataaatagcggtaaagaacaaagcggtaagtatatatggagctaatcgaaagacccaacgcagcaaagggctcataaaatcgaatagaaccgaagaactgagcatggttgacataaacaaagaaaatccgctcgatgcaaccatcaaaataggcaaaatcaaaaacatcgaggtataatcggtaaccttacgataaaacgatcgaccgccttgtacctgccaaatatcattgaatgctttctctatattggataacaaacttatcaaagtccacaaaaggaaacaaaggcctatccccacgaatactccacctttcatctgatcgagatactggtcgacgaaccctaacatatattccaatgcattgcgttgcgccgggaaataatcgaacaactgactttgtataatatgttggaatccgaatcccttacaaatagcaaataacatagccaacgcaggcacgattgccaaaatcgtactaaacgtcaaagcggaagccttttcctgcaacttttcatttaagaaacagcgtaccgacaagttcaatgttttaagaatatgaatatggagcttatactcggtcacatgccatatatcgaccgagacaaactgccataaccgttttatcaaaaggctggcgcgggcaaaaaaagagggcttgtttttacgctgaaccatagaatatatcgtacagaaaacttctacaaaaaaatacagcaggcctgtaagccgggttatgtactctcgaaagagtgtctgtcatttatctcgaccctgtgtcaccacaaggctctagcggtttaccccccggcatcgggcgagcaaccctacaacgccggtatacataaccttacaacccataagacgtacggcattctacattactgtaaaacccggtgagctcttacctcaccttttcacccttactgctttcgcagcggttattttctgttacgctactccactctcgcgaatggcttcccgttaggaaatatggtgctctatgttgcccggactttcctctcgcatcatacgagcgacagaccgtcctgctgtacgttacaaagatacgataaaaatggcaaagacagaatactgtcagtatgatttttaatcttgtaaattttaacggacaatatgacatgcctaagtatataaaaatgattctcatgacagtcatctgcgttaacccctgttaagtagctatcctgcttattaaaagagcttaaaaagaagatgcaagggtttcaacggcacgataaatgtattaaatttaacgtctgaaaaacttaaatacaagataatattaacatttaaagctaatagattatgaattcttacggaaaaaaattgatgggcatcgccttaattgcagctctgagctccggaattacaatcggcgcatttagtatattgaataagtcggccgattcaaaaatacaagatcaatcgctcgacagtggatatgcacagccgactcgctttacaagagtaatcaatcgaccggctgttgaaacagatttcaccactgccgccgaaaacacggttaatgccgtcgttagtataaaatcgatttctacacccaaacaaagtcaattaggcggttttagcgatccgtttttcgaatatttctttggacaaggagggcgcaatatacaacctcagcctcgtgctggattggggtcgggagtaattattacccccgatggatatattgtaaccaataatcacgtagtagaaggagccgataaattggatataaccctgaatgacaataggactttcaatggtcgtgtaataggaaccgatccttctaccgatttggcattgataaaaatagatgccaaagatctccccatcgtcaaatttggcgattccgataatttgaaagtcggagaatgggtattggcggtaggaaatccgttaggattaacatcgacggttaccgctggtatcgtaagtgccaaagctcgtagcataagcgcactcaaccctcgtagccaaaaaatgggtatagaggcgtttatccagaccgatgcagctgtaaatccgggaaatagcggtggagcattggtaaatacagcaggtgaattagtgggtatcaacacggccatttactccgaaacaggaagttacgccggctattcattcgctattcccacttccatagtaagtaaagtaattgccgatttgaaagaatatggtaccgtacaaagagccgtattgggtatagggtatagagaaatagattccgaattggccaaagaagaaaatcttgaagtacaagaaggaatatacgtcggtgaagtatacaatcgcagcgctgcgatggaagcaggaataaaagaaggtgatgttataacctttattaatggcgtaaagattaaaaatggagccatgctttccgaacaattgagtaaatatcgtcccggagataaaattaaaatagggttgttacgaggaaaagaatccaaaactgtatccctgacattaaaaaatagtcaaggcaataccgagataaccaagattgccggaatggattctttgggagctggattcaaagaattagatgccaagagtttgagagagatgaatatccgatatggagtgcaggttattggattgaaaaacggtaaattcaaagcggccggtatgcgagaaggatttgtcattcttgaaatcaataacaccccgatgaagtcggttagtgacttggaatccatgtacgactctattgtaaaatcaaatcaaaatcaaaaagttatgttcattacgggtatttatccgaatggaaaaatgatgtattatgcagtagatttggccgattaaatctttttggaatatgacccctaaacaagggtcatattccaaattaaaagataattattaaatatagcacaacaaacacaacagaacaaatattcaaacgttataataataaatacgaaaaaggcaggagcagtaaaatggtatttttgtagattcacgttcaaaattaaacattttttacagctccattaacaataaatatagtatatttgcagtcccaaaatctcaatattgcaagatgagacaattaaaaattacaaaatcgattacgaacagggagagtgcttctcttgacaagtacctacaagaaatcggacgcgaagacttgattacggtagaagaggaagtagaacttgcccaacgcattaaaaaaggcgatcatgcagcactggaaaagttaacacgagccaatttgcgttttgtcgtttcggttgccaaacaataccaaaatcaagggttaagtctcccggacttaatcaatgaaggaaatttgggtttaattaaagctgccgaaaaatttgacgaaacgagaggcttcaagttcatttcctatgcagtgtggtggattcgtcaatctattcttcaagctctagccgagcaatcgagaatcgttcgtttgccattaaatcaagtaggatctctcaataagatcagtaaagctctttctaaattcgagcaagaaaacgaacgtcgtccctctcccgaagagctcgcagaagaattggatataccggtagataaaatctccgatacattaaaagtgtcgggacggcatatttcggtagacgccccttttgttgaaggagaagataatagtctactcgacgtattggttaatgacgattcccccatagcagataggtcgttaattaacgaatctctctcgaaagaaatcgatcgcgcacttaaacaacttactcctcgtgaaagcgaaatcattaaaatgttttttggaatcggctgtcaagaaatgactctcgaagaaattggagacaagttcggattaacccgagaaagagttcgacaaataaaagaaaaagccatcagaagactcaggactgcttcgaggagtaaactgttaaaaacttatttaggataaccttattggattgtctgccccaatggcaggaaaaaccgacctgcacctcaggttggttttttattttaaatacctcttcatttattttttcagtcgttcgattgctcaatcgcaataaaaaatttaccttcgtcctcaacaaataataaaatcatggctaaatacctatatcagatattgttaatatcaaccctatgcctttttttacaaaatacatcggcacaagaatcgaccacaggttttgaaaacgggaacaatcaatacgtcatgcgcgaaagcaacttgtcggatatgagcaaagataaaaaaatcaaacctgttacatttggagttgaagcaggagcatccatcgatatgtcggggaatgacttttcttctttcgatttagatttattcgcaggctaccggtcccacaccatcaaatgctttggtttaggaataggtcttcacagttcattttccaacaatcgatactacctccctatttatgcacttttccgttgtaatttgctaagcaataaatctcttctttttgttgatttcagagcgggttattctaccaatcaaatgtacaaaggagaaaatcaaggtggcttttttggttctgccggattaggtatgaacctatctgtaagtaaaaaattcgggtctcatattcttatcggatataatttttatcaaatatctccatttaccgatgaaaaaggaactttccaagatatgaacggatgccatctcgtatctatccgattaggaataagcttctaatggaacgagttgccaattataaataaatatattttcgtcgataaaaattacagattatagatttaaagaagaaaaatatgatattttattttgttttctcaaaacaataactacctttgcacaggaaacaaaaaaattcaataatgataatagaattgctaaacagcctaattattgatcttctatcgaatgtaacagaatagaagtgagatatagtgcctagcaatttacgatacaaaaattatagcctttctcacgaatacgtcgagaaaggctttttacaatttaatatagcaataacatgtccgacagattatttatctttgacacaacattaagagacggagaacaagttcccggatgccaactcaacacagttgaaaaaatacaagtagctaaggcattagagacacttggtgtcgacatcatagaagccggatttcctgtatcgagtcccggagacttcgaatcggtcgtcgaaatatccaaagctgtaacatggcccacgatctgtgcgcttacccgtgctgtcgaaaacgatataaaagttgcagccgaggctcttcgatatgccaaacataaacgtattcatacaggcattggaacttcggactatcacattaaatataaattcaattcgactcgtgaagagattgtagaaagagctgtggctgctgtcaaatatgcgaaaaaatttgtagaagacgtacaattttatgctgaagatgcaggccgtaccgataatgaatatttagccagagtagtcgaagccgtcatcaaagcaggcgctacggttataaacataccagatacaactggatattgtttgccggacgaatttggacaaaaaatattatatctcaaagaacatgtctcaggaatcgataacgttacgatagccactcattgtcacaacgatttgggcatggcaacggcgaatacgatggctggaatccaaaacggagccagacaagccgaagttacgataaacggcatcggtgaaagagctggaaatacagcccttgaagaaatagccatgatttgcaaatgccaccacaacttacagatagagactaatatcaatacacaaaagatttacggaataagccgcatggtctctaatctcatgaacatgccggtacaaccgaataaagcaatcgttggccgcaacgcattcgcccactcgtcaggaatccaccaagacggtgtattgaagaatcgggaaagctatgaaatcatagatcccaaagacgtcggaattgacgaaaactctatcgtattaaccgcaagaagtggacgggctgctttgaaacatagacttcatttattaggtatcgaattggaaaaagatgctttaaacaaagcttatgattcatttcttaaacttgccgatcgtaaaaaagatatcaatgacgacgatatattaatgttggtagggaaagagagaacagccaatgcacgcatacaactagacttcctacaagtaactgccggagtaggaataaaatccgttgccagcatcggattagacatagccggtgaaaaattcgaagcagcagcttcgggaaacgggccggtagatgccgccataaatgctatacgatgcatcattcaccgaaaaatggtagtcaaagaatttcttatacaagctatcaccaaaggcagcgacgatgtagggaaagtacatatgactgtgacctacaacggaaactcatactacggattctcggcaaatacagatattgtcgcagcctctgccgaagcctttatagatgctattaataagttcattatataacgaaatcacatgaatacattatttgataaaatatgggatacccacgtcgtaacctcggtgaaaggaggccccgatcaattatatatagacaggcactattgccacgaggttaccagtcctcaggctttcaacgaactgagggctagaaatttgaaggtttttcgaccgaaaagaacgacttgttctcccgaccataatattcccacgttaaatcaagacaagcctattgccgacccggtttctcgcaatcaagtagagacactcgccaccaatgctagcgagttcggcttagctcattatggactgggaaataaaaaaaacggaatcattcacgttatcggaccggaatatgggttgactcaaccgggaatgaccatcgtttgcggagacagccacacttcgacccacggggcttttggagccgtcgctttcggtattggcacgagcgaagttgctatggtattggcatcccaatgtattttacagcccaaacctaaaacaatgcgcataaatatcgaaggaaaactttctcccggagtcacagctaaagacatcgctttatttatcatttctcgaatgacgacaggaggagctaccggatattttgtggaatatgcaggagaagcaatccgctcgctcagtatggaagaaagaatgacagtctgtaacctcagtatcgaaatgggagctcgcggaggtctgattgctcccgacgaaacgacattcggttatataaaggataaagaattcgcacccaagggaaaagattgggacaaagccctcgcctattggaaaactctatatagcgataaagatgctacattcgataaggaagtgacatttaatgcggcagaaatctcccctcgcattacctatgggacaaaccccggaatgggaatcgctatcgacgaaagaataccgttggaagaatcgatcgaagacagtggaaaaatttcgtttcgccgggcattgagttacatgggtttctctgccggagagcttctaatggggaaaaaaatcgactatgtttttttaggaagctgtacaaacggccgtattgaggatttcagagcttttgccaatttggtaaaagggcacaaaaaagctaatcatataattgcttggctcgtaccggggtcacaagccgtgttgcgacaaatcaaggaagagggcatcgatcttatcttgtcggaagcaggattcgaaatacgtcaacccggttgttcggcttgcttagccatgaacgaagataaagtccccccgggaaaatatgctgtatcaacctctaatcggaactttgaaggtagacagggtcccggagcgcggactatacttgccggacctttggtagccgctgcgacagcaattacaggagagataaccgatcccagaaaatttttataactttgtatgactatgataaaaaaaatcgacatcataacatcgacatgtattcctcttccccaagagaatgtagataccgatcaaattatcccagctcgttttctaaaagccgtttctcgggaaggtttcggagaaaacctgttccgcgattggcgcttcgataaaacagggcaacctattcgagattttattcttaacaatccgctctattccggttctattttagtagcggggaaaaacttcggtagcggttccagccgtgaacatgctgcttgggctattgccggatatggattccaagtagtagtatctagtttttttgccgatattttcaagaacaatgcacttaacaacggagtacttccggtaattgtctcagagcaatttcttaccagtttattcaaacatattttttcgaacccacaatcgaccgttacagtcaatttgaaagagcaaaccattacagatgacacaagcggagaatcggaacatttcgaaataaatccttacaaaaagaactgtttgctcaacggatatgacgacatcgattatctactgagcaaaaaacaagaaatagaaaactgggaagaaaaacattcataacgaaatcgagaagtactatggttgtagaaattatggatactactctgcgagacggagaacaaacgtcgggggtatcgttcgcccgacaggaaaaattgagtatcgctcgcttacttttagaagacctaaaaattcctcgcatcgaaattgcctcggcaagagtttccaccggagagtacgaaatggcgaaacaattatgcgaatgggccgagaaacgagggcacatcgacaaaatcgagatattgggatttctcgataaaggagcttctatcgaatggattcgttcttgtggagccaaagtgatgaatttgctctgcaaaggatcggaaaaacattgtaccttccaacttcaaaaaacggtacaggaacacgtcgaagatatcaaacaaactattaagaaagcgaaagaagtcggactgaaaatcaatctctatttggaagattggtccaatgggatacaacattcccctcaatacgtttttcatttaatggatgctttaaaaaatgaagctgtggaaaggttcatgttgcccgacacattaggtatcttgaatcctcttcaaacgctaaaattttgcagagccatgcgcaggcgttaccccgacttacgattcgactttcatgctcataacgattacgatttggcgactgccaacactttcgctgcaactctaaccggaatacaaggcgtgcattgtaccgtaaacgggctgggcgaaagagcaggaaatgcacccctcaccagtgtcgtagccgtgttgcatgatcacgtaaaagcgacaaccggaattaccgaaaacatggtaaacaaagtgagtcgtatcgttgaatcctattcgggaatacgagtcgcagccaataaacctattattggagaatccgtatttactcaatgtgcgggagttcatgccgacggagataataagaacaatctttattacaatgatttattacccgaacgattcgggaggaaacgcgaatatgcacttggcaagacttccgggagagccaatatccgtaaaaatctcgaatcgttaggtatcgaactcgatgacgaatccatcaagagagtaactcagagagtggtcgagttaagtgataaaaaagaaatggttaccccagaagatcttccctatatcatttcagacgtattaaaacacgaaaccatagctcagcacgtcaaggtaataaattatactttaaacctttctcagggattaaagccagtagcaatcattgccatcgaagtaaacggaaaaacatacgaaggagcgtctaccggcgacggacaatacgacgcattcgtaaaagccatacggaagatatacaaagaacaactcggacgaacgttcccgtcgttgacaaactatacagtaaacatacctcccggcggacacaccgatgcattggtacaaaccgttatctcatgggattataatggaaatattttgaaaacacagggattggacgccgatcaaatggaagccgccatacaagccacaatcaaaatgcttaacttaatagaagataaagagctgaatatacaagacaattaaaatagaaagaatatgaaattacatatcgcagtattgcccggtgacggaattggaccagaagtagtggaacaggctttgaacgtaacaaaagccgtttgtgaaaaattcggacattctctggaatatcaaatagccccggtaggagcttgcgccatagaagaaaccggattgccttaccccgactctacacatgaattatgtatgcgctccgatgccgttttgtttggagccataggttcgccccaatacgacaataaccccaatgcgaccgtacgccctgaacaagggttacttgccatgcggaaaaagctcggactattcgcaaatattcgtcccataaccacctttcccggattgattcataaatctcctctccgttccaatattatcgacggcgcagactttatgtgtatccgagaattaacgggaggattatatttcgggcgaccgcaaggccgtagtgaagacgggaacatagcctatgatacttgtatatacagtcgggaagaaattgtacgaattgtccaattggcatacgaatacgccatgaaacggcgtaaaaaagttacaatggtcgataaagcgaatatattggcgacctcccgactatggagagaaatcacgcaagaaatagcatcggagtatccagaagtcgaaaccgaatttttattcgtcgataacgctgccatgcgcatgattcaatgtcccaaaagtttcgatgtcgtcgttaccgaaaacatgtttggcgatatactcaccgacgaaggttccgttatcacaggttccttaggtatgctgccatcggcatcgattggcctgcatacttctgtattcgaacctatacacggttcctatcctcaggcagcggggaaaaatatagccaacccgttggcaaccatattgtcggcggctatgatgttcgaatatgcatttgggttgaaagaagaagccttatcgattcaaacggccgtgtccaaatcgatgaatgccggaatcgtaaccgaagacatcgccggcacaagtacgaaatcctaccataccgacgacgtaggcgaatggattgtcgaatggataaaaagccactgatcaaagcaataataaagcggatagtaaattttgaatactatccgcttttttgctatttccttatctaattatctattgagccgaaccagaaaatacgacaattctattccaattattatttttcggatataattgagaatcactaccattagcaataatctgtattcgttttctatctatattgtatttctcggtcaataatttgacaacagactccgcacgacgctggctcaattgtttattatactcgggtgttccggttgctttatcggcataccctattaccgagatattacaagatggattgcttttcatccattgtgctatgttataaacatttaccatttcttcattagaaacaacagcgctattgatcgtaaagcgtactacacccgtcaactcttggctacaagccgctggctctattacagttacctcctctacaaccgcttctgggcatggaggacattccacaactcttgactcgcactcgttcaattgagccctcaatgcattaaccctgttattcaaatcgccgataaccatttgatcggcataagcatcgtatgctttaaatcggtctttgccgaatttaatagaaaaacctccgattgccgaaataacactttcgacttctgttccttcgacaattccattaaaatgatcgccaattaaattacctcgtccctccaagaagaaatcgacataatgcgacaatctgaaattcagtttaataccggctgttatagggaaagcatacgttttattattatatggagtattatggaatgaataaataccaccggctccggcaaaaggtatgatagaaaatacacgatcctcgttataaccgtggaaagtattaaacatattccacatgatatcgccgtaaaccgcagcataacgcatatgtgtcatcactccttcggcaagcggccaattggtatgtaaagcacctcccattgcagataatcggaatcccaaatacgggctgatccatttaccgatagcgaagtccatagccagtgtatattgagcatctcctacatgttcggtcaaaaaagtttgacctccggctcctatcgaaataaaccagttatttttatgactatcagaataataccgaggcttggtaggtacaacctctgttaccgaaacatcttcttcaacaataatcgcttgagctcctgccgattcggaataacagaaaagcgaagttgtagctatggctaccgctaaataaaagaaatttgttttcattttaatttgttttagttatacaattttgcaattacatttcaaaaaaacaggagcataagtcaaacgctattatccgtttttgtaaattaaaacaaacagataaaagaatgtgttcaccaaccgtcgaaaaaaagagatagtaaaattctatattatttaggctatataagcttcttataaaaaatgaaaacaggttataccggttggtaataaattattaaatttgcacataccgatgaatgcgaaacttttacccatcgaataacagaggtaatatttatgaaacgaaataaaaaaaattctgattttttctcgaaaaaacgctccaaatacaaacttacatttttcaacgaaagctctcttgaagatgtatggactatttgtttttcccgatttggagccataatgaccgccattcttctcattggtctgattgtcgtagctatactctctgtaatcgtaggtacacctgtaaaaaatttattacccggatatttgaaaacagaagaacgaatcgaaatggttgataaaatccttagagtcgattctttggcggcagaagtacagcgtcgcgacgcatatataaaaaatcttgcttccatacttaccggtgaaataaaaatagattctatcggacaacaagccgacagtctgctttccacaacgacagatactcttctaccggaatccaaactgatggcaaactatatcaagcaatacgaacaagaagaaaaatacacgctaaatgtttttaccccgactactcctatcgacggaaaactgttttacccgccgctaaaaggcaaaataatcaaagcctataaccccaaagaaggacatttcggtatcgacatacagtgccccagaaatacagctgtttctgccgtcctcgatggcacgattgtttccgccggttatacaatcgattacggatatgtcgtatatatacagcacagcaataattacctgtcggtctataaatataattcggggattcttaaaaacataggagataaagtatcgggaggtgaaaaaatagccgtgaccgggtgggaagatggtaaatcctcaaaacaatcatgtgtggccgaatttcaattgtggcacatgggtcagtcgttagacccggaaaaatatatcactttctaatcccgattcattaaagatacactttattttatacctttgtaaagttaaaattgagatttgacctcttaaaccgaatgaaaaagcaattagcaatattaggctctaccggatcgattggaactcaaacattagaagttgtcgccgaatatcccgacttattcgaggtatacacattaacagcgaataataacgtcgacttgctgatagaacaggccaaacattttaatcccgattcggtagtaatagccaacgaagctcattataataagctgaaagaagctctgaaagatttccctataaaaatatatgcgggagaaaatgccatttctgaaatcgtagaggcagcgcccatcgatatagtagtcacggcaatggtaggatattcggggttaaaacctactatacgagctatcgaagctcataagaccattgctttggccaataaagaaacattggtagttgccggggatctcatcaaacgtcttgctctcgaataccggacacctatcattcctgtcgattcggagcactctgctattttccagtgcttagttggcgaaggagataatcctatcgagaaaatcattttaacggcatccggcggaccattccgaaaattcacggcagaacagatggcgcatgttaccaaaagcgacgctttaaaacaccccaagtggcacatgggacataaaattaccatagattctgcaacacttatgaacaaaggctttgaaatgatcgaagccaaatggctgtttgacgtatcccctcaaaacatagaaattgccgtacacccgcaatctatcgtgcactctatggttcaattcaaagatggatctgtcaaagctcaactggggacccaagatatgagactccccattcgatacgccttgtcctatcctgctcgtttggaaagctcggctccgaaattgacactcgaacaatactccgaactcacattcgagtatcccgatttcgaacgattccctttgttacgatatgcatttgacgctgtcgcaacaggtgggaatatgccctgcattatgaatgcggccaacgaaatagccgtagccggtttccttaacgacacgatcgcctaccccgacattgcccgcattgtttctgaaacaatggagcatatagaatttatcgagtcacccgaatatgaggattacgtccacacaaacaaattagcccgcaattatgcgaccgaacttgttaaatcatatcaataaaaaatagcattattaatggaaacattcttaataaaaacagtacaactactattaagcctctccatattagtcattttccacgaatttggacattttatattcgcccgaatgttcaaggttcgggttgaaaaattctatctgtttttcgatccgtggttttctcttttcaaattcaaacctaaaaatagctataccgaatatggaatcggctggctaccgttcggaggatatgtgaagatttcgggaatgatcgacgaatcgatggacagagaacaaatgagccagccgcccaaaccgtgggaatttcggtcgaaaccggcatggcaaaggctcctaattatggtagcgggcgttgtatttaatttcattttggccgtcttcatctattcgatgatcgtctacacatggggaacatcttatataccgttcaaaaacgcttacgctggtatggaatactgtgagtcggcaagaaacataggattccaaaacggagatattcctctctcggccgacggtgtcgatttgaattatatgtcgagcgagacccttcaaaaaatagtagacgccaaagaggtgaaagttttgcgagataacgacacaataaccatcgaaatccccaaaaactttatgttacgattgatcgataaagaagaactgttcgcattataccgtattccttctgtcgtgttcgaagcctccccgaataccggggcagcacgagccggtctgcaaaagggagaccatatagaatcgatcgatggagaaaaggcatcatcactaaatgaaatgcacaaaatactggaatccaaacctaacaccagcgtgtcggttgtctactcccgaggctcagaagtgaaaacgacagaaatcacgacagattctttgggacgattaggcatagccattgctcctttgagcgatagttatgcaatagtcacagaacattatggattctgggaatcttttcccaaagggatagaattgggagtggacaaattgaagagctacgtgagtagtatgaaatatgtattcaccaaagaaggagctcaaagtttaggcggatttggagctatcggaagtatattcccggcaacatgggactgggaggctttttggagcatgacagcatttctctcggtcatattagccttcatgaatattttacctattcctgctcttgacggaggacatgtcttattcctactatacgaagtgattacaagaaggaaaccgaacgataaatttatggaatacgcacaaatgggaggcatgctcttcctatttgcattattgatttatgctaatggaaacgatatattccgatttttctttaagtaacagactatggactacattaaaataacattaaaaccggggaaagaagactcgttccacagattccacccatgggtattctcaggagcgatatatcgctttgagaaacaaccagaagaaggagatatcgtcgaggtaacagaccatcaaggaaattttatcggtataggccaataccaaatcggtagtattgccgttcgtatattgacttttaaaccggaagaaataaacgagcaattctacttcaaaagattgcaagaggcatataatgtgcgattaagtctcggtctccttaacggagagtataacaatacctgccgattggtacatggagaaggagacaatttaccggggcttatcatcgacttatataataaaacggctgtcatgcaagctcatactccgggcatgcattacgcccgtcatcaaatagcccaagcgttgaaatcggttttgggaaatgcgatagacaatatctactacaaatcggaaactactctcccctataaagcagaacttgatgcagaaaacgaatatctgttggggggcgatgcacctaatatcgccacggaaaacggactgaaattttatgtcgattgggttcgtgggcaaaagaccgggttcttcgtcgaccaacgggaaaaccgggccttgctcgaacgctacgctcacggacgatcggttttaaacatgttctgctataccggcggtttctctttttacgccatgcggggtaatgccaaattggtacattcggtcgacagctcttcgaaagctatcgatctgacctgcaaaaatgtagagttgaactttcccggagataacaggcatcaagcatttgccgaagatgcgttcaaatttttggatactatgggagatcaatatgatttaattattctcgatccaccggcatttgcaaaacataaaaaagtattgaataatgctttgcaaggttatcggaaactgaatgcaaaagcattcgaaaaaattcgtccgggaggaatattgttcacattctcttgttcgcaagtagtaagtaaagaaaatttcagattggctgttttcagtgccgcagcacaatcgggacgcaatgtccgcattttacaccaactgactcaacccgccgaccacccggttaatatctatcacccggaaggtgaatacttgaaagggttagtcttgtatgtagaataaaccaaatttcaaaaaatcacgttatatgaaaaaaattgtttgtacaatggcttcattgcttatcttagcatcttgtgctaccaaacaggaaaaagacgacttcgattacaccgtagaatcgtttgccgatcttgaaatcctgcgttacaaagttcccggattcgaggaattatctttaaaacaaaaagaattggtttattacctctccgaagctgcggcatacggccgggatatactttatgaccaaaacggaaaatggaacttggccattcgccgcactctcgaagcaatctatcaaaactataccggagaccgcgaaagtcaggatttcaaaaattttgaagtttatctgaaacgggtgtggttttcaaatggaattcaccatcactacggctgtgacaaatttgttcccgaattttcacaagaattttttaccgaagctgttaaatcgctcgaccctgaaacacttcctctaaccactggtgcaagtgtagacgatctactcaatacattgactcctgttattttcgatccctcggtcatgcccaaacgagtaaatcaagctgccggtgaggacctcatcgtcacctcggcatgcaattattacgatggtgtgactcaggccgaggcagaagcgttttataacaaaatgaaaaatcccaaagacgaaactcctatctcgtacggactgaatagccgtttagtaaaacgtgacggaaaaatcgtagaagaaacctataaagtgggcggactctataccgaagctatcgagaagattgtatattggctcgaaaaagctgccggcgtagcagaaaacgaacaacagaaagaagtcatcgagaaactcatcgattattaccaaaccggtgatttgaaacaattcgacgaatatgccattctctgggtaaaagatctcgattcccaagtagattttgtcaacggttttaccgaaacttacggcgatccattgggcatgaaagcgagctgggaatctatcgtcaactttaaaaatctcgaagcatcggaacggactcatacgatcagcgataatgctcaatggttcgaagacaattctccggtggattctcgattcaaaaaagataaagtaaaaggtgtttcagccaaagtaatcacagcggcaatgttagccggagactgttacccctccacccccataggtatcaatttacccaactctaactggattcgccacattcacggatcaaaatcggtaacgatcgaaaacattaccgaggcttacgagaaagccgcgcaaggtaacggattcaacgatgagttcgtatggagcgataccgaacggaatttgatgaataactacctcttccaagccgacaaccttcacaccgatttacacgaatgcttgggtcatggatccggtaaattgttacccggtgtagatcccgatgcattaaaagcatatagctccacattggaagaagctcgtgccgacttgttcgctctatattatatggccgatcccaaaatattggaattaggtcttcttccttcggaggatgcctacaaagcagcttattacaaatacatgatgaacggactcatgactcagctcacccgcatagaaccgggaaaaaacatagaagagtcgcacatgcgtaatcgccaattaatcgcccgttgggcctacgaacatggtaaagccgacaatgtcgtggaatttgccaaacgtgatggaaaaacttacgttgtcatcaatgattatgaaaaactacggagtttgttcggtaaattactggccgaagtacaacggataaaatcggaaggtgattacgaaagcggtaaaaacttagtcgaggagtatggagtaattgtcgaccaagatttgcacaatgaggtattggctcgatatgaaaacctacacatagctccgtacaaaggatttgtaaatccggtctatacacctatcaccgacgagaacggaaatataaccgacatacaaatctcctataacgaaggatatgccgagcaaatgttgagatactccaaagactattctcctctgcctatctatacgtctatacccgttgtttgtaaataatcgatacaacgatactaccctcaccccgatatatgccagatatatcggggtgctctttttctacaaaacatctttactcgcttatttttaatttgtatcttgcaacaaatttcaattacacatcatgcaacaaaaaatcaaagacataaaacttaaattcagacaggcaatgaacgggatcgtttctcaaaacatgagaaatctcggagccaactacaaaataaactttggactaacattacccctgttaaaaaaaatagccgaagagataccggcggatgctcaactggcaaatgctttgtggaacgataccgccgtgcgtgaatcgatgatgctggcgcctatgctctaccccgcagatgaatttaacgaagatgaagcagaaaagtgggtcacgaatatgcccaatatcgaaattgccgatatatgctgtaaaagcctgttccgccgactccgattcgcacctcgaaaagcactgtcatggagtctctccgacaagatgatacgacagtataccggattgcagttagcgacagcttggcttatcgaccaccacgaaataaacgacatttcgatattcgagcagatagccgatatcgcactaaaaaaagtggcagacccaaatgtcaatttagcttttcctgccgtcaattatctcaaacaagccatgcatcatgacaaactttctgtctatattctgtcgaattcaaaaaactcattcgagaacaatgagttatacagtaacttattcgatgaattaaaccaagaaaaggaactgttcaaagaattttcgagatacgattcaaactgaatttgttttgcttgtaatacaaaaatagctaaatttgtaacataggttgtttaccatgccagaagaaaaatcaaaagaaactgtaaaacagttgtttatacaatttttagaatcccggaatttacgaaaaaccccggaacggtttgctatattggagaaaatatacacgacaactcaacacttcgatgtagaaactctatatgaagctatgatccaaaatggatacagagtaagcaaagccacggtctataacacgatagatctgttactcgaagccaacttagtgcgcaaacaccaattcgggagtaatctggcacagtatgaacgagtatataatgccaaccatcatcatctcatctgtatgaaatgtggtaaagtcagggaagtaaaagatttggatttgatgtccaatttgaatactcgcaaattcaataaattcaatacatcgtactataccctatatgtctatggcatttgtagccgatgtagcaacaaaaacaaaaaagataaaatcgaaaagaaataaaccgaattaaagtttacataacactcaaattatgaaagtcgatgttctcttaggattgcaatggggcgacgaaggtaaaggtaaagtcgttgatgtattgacacccaattatgatataatcactcgctttcagggaggccccaatgccggccatacactggaattcaaaggcgaaaaatatgttttacgctctattccttcgggtatttttcaaggagggaaaataaatatcatcgggaatggcgtagttttggatcctattctgttcaaagaagaagccgaaagtttagccgaaagcggacacgatctcacccaatgcctctacatttcaaaaaaagctcacctgattttacccacacaccgaattctcgatgcggcttatgaagctgcgaaaggaagctccaaaatcgggaccacaggaaaaggtatcggacccacctattccgataaaatcagtagaaacggtgttcgcgtaggcgacatattcctcgatttcaaaaaaatatataccacggcaaaaactaaacacgaaaatattcttcgctctcttaattacgattacaacatagacgaattggaacccaaatggttcgaagctatcgaatacttgaaaagatttaaaatcattgacagcgaacacgttatcaatcattacctgaaagaaggaaaatctatcctcgccgaaggagcgcaaggaacgatgctcgatgtcgatttcggttcttacccgttcgtcacgtcatcgaataccgtatgtgccggggcatgtaccggattgggcgttgctcctagtaaaatcggagaagtgtatggtatattcaaggcctattgtacccgggtaggaagcggcccctttccaactgaactattcgacgaaaccggaaagaaaatacgagacctcggccatgaatacggtgctgtgacaggacgagaacgacgctgcggctggatcgatttggtagccttgaaatacgcaattatgatagatggagtaaccaaactaatcatgatgaaaagcgatgttctcgattctttcgaaaccattaaggcttgtgtcgcttatcggataaatggaaaagaaactactgaattcccctactctattgaagaaaatattgaaccggtttatgtagaacttccgggctggaaaaccgatatgactaagattcacacagaaaaagaatttccccaaaagttcaatgattatatcgcatttttggaaaaagaattacaagtacctatccaaattgtatcggtgggaccggatcgtgaacaaacgattatcctatccaataaataataattaacctaacctctatctactatggctaagattaaaccattcaagggaatacgtcctccgaaagatttcgtcgagcaggtggcctcacggccttatgatgttctcaattcagaagaagcgcgccaagaagccgatggtaatgaaaagtcgctctaccatattattaaacctgagatcgatttcgtttccggtacggacgaacatagtccagaagtttatcaaaaagcggtagagaactttaatatgttccaagagaaaggttggttggtacaagataacaaagaacattattacatctacgctcaaaccatgaacggacatactcaatatggattggtcgtaggtgcatgcgtcgaagactatatgtcgggagcaattaaaaagcacgaacttactcggcgagataaagaggaagaccgtatgaaacatgtgcgtatcaataatgccaacatcgaaccggtattcttcgcttatcctgataatacagaactcgatgcaatcatcaaacaagaaacttctgtttctcctgaatatgattttgtagctcccgatggattcggacaccatttttgggtaatcgacaacgataaaacgatagctcgaattacagaactatttgcacaaattcccaatttatatattgctgacggacatcaccgaacggctgcggccgccctagtagggaatgaaaaagcccggcaaaatcccaatcatcgcggtgacgaagaatacaattacttcttagcagtctgcttcccggcatctcaattacagattatcgattacaaccgagttgtaaaagacctgaacggacttacccctcatgaatttcttgaaaaactaaaagaaaatttcattgtcgaagaaaaaggagtgcaaatatataaaccgaaaaagctacataatttttctctatatatagatggaaaatggtattccttaacggcaaaagaaggtacatacgacgataacgatcccataggaatactcgatgtaactatatcttccgacctaattctcagggatattttgggtataaaagatttacgctcggacaaacgaatcgatttcgtcggaggaatccggggactcgaagaattgcaacaccgagtcgacagcggtgaaatgaaaatggctttggctctatatccggtatcgatgaaacaactgatggacatagcggatacgggtaacataatgccacccaaaacaacatggttcgaacctaaattaagatctgggctgattattcataaattggagtgagaagactggtctattccctcacttagcggttctttgatataatattatttaacaaagaactgctatattattttttatctcatgcagcaaaaaagggtttgattacatctatttaatgtagaagtaactcaggccgagtaaatcggtatgaatgaaaaagagctgatagaagcttgtaaaaacaacgacgttcgagcgcagaagttactttacgaaacttttgctcgcaaaatgatgtcggtttgtttgcgttatgccgataatcgagaaatggcagaagactttttgcaagacggatttatcaaagttttttcttccatacggagttacagttacgaaggttcttttgaaggatggatgcggcgcatttttgtcaatacggcattagaggctttacgcaaaaacgatctgttaagaaacggagtcgagttagatgcgttagaaccacagcaagaggccgactactctgccgtagaaaaaatatcggccgatgaattgatggaactcatcgcgcaactacctccgggctttcggacggttttcaatatgtttgctatcgaaggctattcacatagagaaatagccgagactttaaacatcaatgaaagtacttcgagatcgcagtatacacgggcaaaaagattgctgcaaaaatggattaaagaattaaaataaacaggtattgataacaatctattaatgatagacgatcagaatttcgaaaaagcaatacgtaccaaactggtacaacatgaatccgatgttccggatgccatgtggtcgggtattgagtcgagattgcctaaaagagtacccaataaagtacccctctatcgtcgtatcatgtggtattcggccgctgcaatcgttatgggtgttatcgttacggtggctttatggcaatatccagataaagaaatatccgcacctctcgctgttaatgaggattacacagctcccacaataacacaaccttctatttcaaatcttcattcaagtattgaatctccttcggtagagacacccaaatttttaccggtttcatcgcatcagtctcagagtcaaacaaagcaagaaactcaaacagactcaaaaattgaaatcgtcgaaacgaataaaatgaatgaatcccaagtagaaaacagagctaataatacaaaatcagaacaatacgattcacaatcctatcggaaaaagttagaagatttcgaaaatgacggcaaaaaactgaaagaggccgatcttgcaattaccgaaccgatgaaaaagagtaaaagcaatgggctaaaattcggacttatggcatccaatgcgacctctggaaacagtaagaatccggccaaagctattcgcacgagaaatccgctaatgatgatgtcggcaagaaggaatccagtttatgaatttgaccacaagatgccattatctgtgggagccacagtttccaaaagtttggcaaaaaattgggagttagaatcaggtataatatacacttatttatactccaaatatcattcaaccaacggaaacggtagtcaagaattacattatttaggtattcccatagatattatatatcgatttgcccgagtgaaacgagcatctttttatgcttctgcgggaggaaaggtcgatttttaccttaccggacagcagaaagacgaaggacacgacgaaggaatctccgggtctgggtataaaaagctcgaacatgaaaatgtacaattctctgtacaggccaaattaggagcggctctcacactgtataagcaaacggaactttatttggagcctcatatcacatattatatcgagaataattcgagtatacacaatatatggaaagataaacctttcaactttggattaacgttgggaataagaactggcttttaaacgaacaacatttataaactaagaacaaaaaaataatgaacacattgaaacttgtatctattctaattttactctgtggcgttttatcattttccggctgtttaggtgacggtggaaatactttatctgtatactctacgggcagtatctataaaacttcgacaggaacttcctatatgtttatagaccgagccggtatatctgcgacaagcgcagaattacaaggtgaaaggttagaagtaggcgacagaatattagctaccacgaccatcgatttcgataatcaaggaacccaattggcgcaaggtatatacaatgccacgattgcaggggtacataaattcgattgtaaaaactatacattcgataattctatatcctctttcgctagtgacacattgcccacactatatggtgtagaacctttcctaagctatcgcaaagacgacacgatattgacttttgcatatgtcaaacatgatgtagaaaacggtgatccgagttctttgaagctagtccaacctaaattatacaatccagaggctaaaacagatacactctttctcatatatgaaaaagggaatatcaaagatagcaaaagctcggactatatttctttcaaattacctcaatatccgagtgacacagatattaacgtcgttgtaagatacaatgccgaaagttccaatttatcgaccaataacggcgacggaaccagtaaactattttctataacatataacagaccttcgacactaaactaattctataaagaacttttatttttgatgtttataatttcagacggggtgtccgtgaggatacctctttctttttataaaaacgaaggcatttctatcgatttcacccattgcaataattacaaaagaatattatctttgtttccttataatactcataaaaaacgatgaaaaaactttttttctttgctatcgccctgctatggacagggttcagctctttctcgaaaactcttcctttgcaaggagagtttataaatccctcgcaccgatacattcaatacataggtcgtatcggccataaagctccggatgctattcgtttcaattatcccggggttcaaatacgggcttcattccggggtacatctctaaaaatgtatgccaagcccatgagtggattttttatggtaaagatcgacaatgctgcccctttcaaaatttcattcaactccccctccgactcgatcgttacccttgcctctgcactaaacgatacggttcataccgtgactatcatgaatgtaatagaggctttccatcgtcaaccggaattcaaaggctttttgcttgacaaagggaaaaacttggtattcccgcccaatcttccacaacgcaaaatcgaatttatcggtaattccatcacatgcggatacggaatagagagtgttgaagcctccgatccctttaccgaagaaacagaaaatcactattacacctacgctgcaatcactgcccgaaacctctatgcccaacattttgcaatagctcgcagtggaataggtatctaccgaaattataacgggccacgtgaaggcagtcctgactgtatgccagccatgtataatcaaactcttttcaatgattcctccgaaatttgggacttctcccgatatatcccagacgtcgtatgcataaacctcggtacaaacgataccagcacgcccggttatgatacgaatcgtttgtataatgcctatctcgctttccataaaacagtacgcaataattatccaaaagccaaaatcgtgtggcttacaggctgtatgcttcatggtgagtcgttgtctttggttaaaaatacgctcgaccgactctccgatacacttcacaaagccggagacctagaagtatatcgtttcgatatgactccccaaaccggagaattaggatacggagcaagttggcatcccagccttttacaacaacaacgcatggctgacgaactgactccatttctccgtaagttaatgaactggacagactaaccagcttcaacaaaaaacattacggaagacgggctcaaaataaattcgttttattttgagccaagtcatattctgtaaaagtcacatataaaaaagcccagaaagacctcaatctttctgggcttttttatatgttgggtagaactatcttaacgaaacaaatccgtgtggtctgcgatataccaatcgtacatcttttgtaccccctcctctatctcgattttatgatgccaccccaaagcatgtagtttggaaacatcggtcaatttacgcatggtcccgtccggtttatcggcattgaaccgaatctctccttcataaccgacaacttcccgtatccgatgagccaaagcagctatggttatttctttacctgttccgatattgatatggcaattccttacttccgggttatcacctttcacatcagagaaatcgacatgttcgagaatatataccgaagcatcggccatctcctcgctccacaaaaactcacgtaacggtttcccggtcccccacaattccacataatcgggataaataccatacttacccaacaccgtgagaatagctcctgtcgtggcggttccctcgataccctccactggccgcaacgataaatctttacgaacagcaccccaatcgtccatcattaaacattttcccaaatgtatcttacgaatcatagcaggcaacacatggcttcgctccaaatggaaattatcgttagggccataaaggttagtaggcattacagcaatatagttggttccatattgcaaattaaaactttcacacattttcaaaccggcaatcttggcaatcgcatacggctcgttcgtatattccaacggagaagttaacaatgcatcctctttcatcggctgtcgagcatcacgcggataaatgcaagtactgcccaagaacaacaatttctttactccatgtctgaaactttcaccgatgacattctgctgtatttgcaggttttgatagataaaatctgcccgatagatactgtttgccataattccccccacatgagcggccgccagaatcacatactccggttgctcttcgtcaaagaatctcttcacagcaaccccgtcgagcaaatccaattctttatgagaacgacctatcaaatgggtgtaacccttttcctgcaaattcttccaaatagccgatcccaccaatccgtgatgtccggctacatatattttggcactcttttccataccgattcttttcttatttaacaatacccttttccagatattcagccaagttcatgcgaatctcgtctccggctctctcgaccgccactttcgccatgtcggcatcgaccataatcttcaccaattcttcaaaagaggtcttcatgggattccaccccaactctttcttcgctttcgtcgggtcaccccacaaattcaccacatcggtaggacgataaaaatcaggagagacctcgacaatgatctttccggtcgcccgatctattcccttttcattctccccttcgcctacaaaatccaattctatacctacatgatggaatgccaactgacaaaactcccgtaccgaatgctgtacaccggtggcaatcacaaaatcctccggtttatcattctgtaaaatgagccacatgcactctacataatccttggcatatccccaatctcgcaacgacgaaagatttcccaaatagagcttctcttgtttcccttgtgcaatacgagcggcggccaatgtaatcttacgagtcacgaaagtctccccccgacgttccgattcatggttaaacaagatacccgaacagcagaacatattataagcctcacgatactctttgacaatccaaaatccatagagcttggccactgcataagggctgtacgggtggaatggagtctgttcgttttgtggaacttgttctaccttaccatacaactccgacgtcgaagcctgataaatgcgacaagtttcggccaaaccacattggcggacggcttcaagaatgcgaagcacaccggtggcatctacatcggctgtaaattccggggcatcgaatgacacttgtacatggctttgagctgccaaattatatatttcatcgggccttactttcccgaccacttgaatcagactcatcgagtctcctaaatcggcataatgcaaatgaaaatgaggccgaccttccaaatgggctatacgttcacgatagtctaccgaagaccggcgaatcgttccgtgcacttcataccccttttccaataaaaattctgcaagaaatgacccatcttgcccggtaataccggtaattaacgctgttttcataactgtatttattcgcttttattgattatttcatctatttataatgtcaccataaaaatatagccgaatgcaaaaaacgagcttattcgagttccttaccgaagcaattccttcattttacaaatatagcgaaaggtgagagcagagacaaatgaaaatttcatttccgatttggctacgccgaaccacatcctatcttcgtagtgacaaagatagcgaaaggtgattgcaaaggcaaacggaaatcacatttccgaatgggctatgccgaaccgtatcctatattctacaaatatagcgaaagtcgaaagcaaaaaagttaagctcgcttaggccttttgataagactcatcttagaaggtgttttaaatttattgagaaataatattatcattgcaagcaggtatgttccggccatgttgagcccctgtctcggaataaatttaaaacagcttcttatattccataaatataacaaaagataaatgtagtgtcaaattttcaaattcggctctaccggcctacttcctcgaatcaatcactcggtttttcccgccaattttttacgttttcgcttgcgattccactcttgataaagcaatttaggcagagattccacaatcatcgagcaacgccctatttgctttttcggttcgcaataaattcggtgcaaaaattccaaatgagcccgcaccatccaataaggagccctgttcacatcggttccgctataaaatttgaatgccgctcccacagcgatcatcacccctcgtttcaaatagggtttcaatttgctcataaatatctcttgcttgggagcacccaatgcaatccaaataatctcggcgccatctttttccaacatctcggcaatagccggatagtcaaactcttcaactctcttataaggtaatgagtaaaaccacatgtttgcaattcgtggatctatctccgacaagttattttgcagcccgtttaaagtcgcttgcgtcgttccaagaaaagccattttatatcgcttcatatggacaatatccataaaaatctcgcttccgcaatactggtgacgttctataccataaatccatcgcaaatacaagggtacataaccactatcacaaatagagaacatcgctccatctacaacctgtctgtaatccgggtcccggtttactgtgcttaaaataaccccgtccgagacacatatatatcccggcttccccaataacaacgcttcgtcgatagcctgtaaaacagctcgtttatcaaactcatacctgatattgaaataattctccataaaaattgatatataaagtgactgtcggaactcccctatcccgactataaaacaatcttacccgcttgtttgatttcagaccgagcccatcgatgacttatttactcggtttgtaaatgtattactctacttgaaatataatccctcgttattccctatctactccaccgttccgaatctttttcacaccattctcccctcccaaacacggggatcacagaagcagagaaatatttactgaaatacaatctacgacaatatgcctcttgcttacgattcaaaagtcccggcttctcgtaatttcactaagaagaaaatagaaaaaattaaaactgtacaaatttttacatcaaccttttcaccaaacagaatgtaccctctttcacccaagccaataagaatgagccaataaacaatatgggaacaataacaaagaaatagatcccaaattgcgactgattcacaaaatagtgttccatgaaatagggataaaccattgcgtcgaacagataacaacatagatacatatcgagagacaaaagcgaaatctttgtcaaacttttacgcaataccggtaatttgaaatcggtctgataaaacagcagaaaaaatgccaaagcaataaccgttccaaatacaccccacgggcctcccgcaatttgaataagcgtatgattatgtacgaacaatgaattaaatacaggatttatcaggcacaataacaaaatcacaatccacaacttccaactttcaaaccgtggtttatactcatgaatataagagccggcaaagaaaaatgtcaacggatagcacgaagcccagaatccgggaaccaaatgtagtccataccgattcaacaaatcgggcaatgccgtcatcacatacaatgtcaatatcaaaacctgtttctgccaccgagtaggtattgctttatacaacatattcaagaacggtgtcaagaggaacaatcctatccacatctcgatataccatgcatatggtatagccgaaaaatcgaatatcttcaaaatccattttgcccaagtcaaatcctcttgtaaataatatttacgaaacaaaatcgtaaggagcgaaaacagaaaataagaagccagtacccgaatacagcctttataataccgtttcgataccgttttattagcattcaaataaccggtcaacagaagaaataacggaactcccgtcataaataacggaatggacattgcctgcaaaaacatcgaaaaacctccaaaatctgtatttttaaatggagtattcaagacaaaaaaatggcctgctatcacaaataatatcgcacagcttcgaactaaatccagccctattattcgattttggcacgatttttgcccccccctccctaaattgttcttgcataattgtttcatattaacttttgaaatagactatcccatttttgataaattacttccgacgaatattcccgtttcagtttctcgaaagccttctcacccaatcgggcaatctcgtcgggacggttccacaacgataccacttttcgctccaaatcatctagattattaggctcgaacaagtctcctatcgcctgctctccccgaccgataatctcggtaaaaccgccatgagccggcccgatagtaggtttaccgtaacaagcagcttcaagaatagccatagggaacccctcgtaccacttactcgccataacgaaaaaagcagactccctataaaatcgagataaagactcacccgataaatatccaactaattcacaattagacggtaaatcttcaacaagtcctttatccctcacttcccctgccaacttaaacaatatataaggattccgacgagctacttctaaaattaaatcaactcccttttctctactgatacgtccacaaaaagctacatatttaccgacttcgttttcgtataacttcggtataggtaaaaaattaggaataactactattttctccgagtcatatccagcagcgatcaacttctgtcgttgaaaatcggtaatgcaagcaaacgcagctacattctttcgatatgcgcctgtccaacgggcatatacattgcgaagggtatacccaatcgattttaatcgactatattcgcagttatatcgcacacaactccactcattacctcgctccaaacacacttcacacggcaaaccatcacgcataaacaatcctgtgggacaaatcaatcggaaattatgtatagtcataacgactggaactccggcctttttacactcgaaaagcgcagccggactgataaacggatacagattgtgcacattcaccacatcgggacgttcccgtcgcaaggcatcccgcattcctcgcactccggacggtgaataaattcccgacaagaatccctttatcttcccaacggccgattctcttaccccctcggttgtccggcgataaaacgccacctcatgaccgtgagacgtaagcatgtctgccatcttatcgacaacagcctcctccccgctatacttcccgtaattattatggacgataaggattttcatttatctattgtttctgaaactgctttatagacattcaatgcagtctgtttaggactaaattcttgttctatttttattgactcctgtccatacgattgtaaatccacatcatgaaataaagacagtgaattcaagatcgtatcttcttttaatggatcgaacaatgtaccatttctaccttcttggactaattcaggataacaaccattgtaaatagaacaagctacgggtaagccacaagccatagcttcgggaaccacaagactccaattatcctctaacgtcggcattacaaaggcatcagaaatcgcatagtatttatatatttcagaatagtctatcgcacctgcaaaaattacactgcggtccgttccatatttttctatataagcttcccgtaaaggaccatctccaataatcaacataatatcatcgggatatcttttactatgctctctccatgcttctaaaagatagtttactcctttcctctcaatcaattgtcccacaaaaatatatatgagtccagagttacctatacataatttttttttcaaattctctcgttccttcttcccataagtagaactatttaatgccaactgtgtgctatcggcacacatccctcctgtaaaaattttatttggatttacaccctgagaaattaaatattcctttgtcaacaccccattgacaatatatccggaaacgaacttattgaccaattttcgatatgcttttctccaccaaggacaatgtcgctctgtatgtgcagtgcgttcatacgctattatcaatggcttacgcctaataaaagaataccaaagagcccaaggtgtaaactgaaaaaaaccttcggctataattacatcggaatttactgacttaattaacttatataatcccctcggaaatggaacagatactccggtgtttgcaaaatcccctcttccgcctaattttatttgtttttctcgtggcaaaccaatggcattatcgcctaacgttttttctattttatcaatacatctttggggtatcctctgcttgctataaaccaaataaaagtttccatcatacaaattgtttaactctttatataatggaatcctataatctaaaaatgacgggttaacccatagaacttttggatttttcatactgctctttaacatttaaataatatttttccaaagactccaatactacgtccattgaaaatttatttttaattttattataagctcttttatgtttaagagaaactgattctttattttccattaaagccattctcaaacatattgccaagcctctcggatcatgaggcttaattaaatacccatctttaccatcttctataatttcattcattcctccattagagcttcctactacaatattaccagacaacattgcttccaaacagaccaaaggcatattctcccaccaagaagggaaacaagaaacttttgattgagcatataaagatttcaatttttctctcggctgattccctaaaaaaatacaccaattatatttattagcctccacttcttgttttagcttcatggcataagcccctattttccccacaattttcaatgtcactggtatattcatttcctgtctcaaaatatggcaagcctctatcaaatcgcccactcctttcccttctgcaactgtacccacatacaacactgtgttttcctcataattaacatcatagtttatccactgttcaacatcaataggattataaacaacttctatatttgcgcataaattaggcacatatcttttgaaccattctttaagactcaatgaacatgatgttatatatttaaattgaggaagaattttcaattcttgtagacccagccaataatcataaaaatacttatgagaaaacggcctcataccggcattattcctatccaataatgtaggtgtatgcaatcttatcacaacagggacatgcaatttcgataaataaaaagcctccgccccaaattcggccacttcaactatatctatgttatctatttcttttaatcgctttaatatcttttttcgataagaataaaatctatacaagcagcgaaattttctgagacaggatttatattctttttcagacacaacaaaatcaccaccagaaagacgaatcacggaaacaccatcatccatgtattccgattcttcatttgtatcatcagatgcacaaataaccgtcacccgatggcctttttttactaatccaatagcagtttctttgatatatgaagctattccaccacccctaaaagtaggtacatattctctactcacaaaaactatatgcatctatctcaattttaaaaataatatacgagacaatttattgggtaacattcctaaaattaaaatggggaaaaacgatttcaccgttccaccaaaaaccattgctttatatgctatttttattgctttatgtccttgtcctatttctatttgaataacagcataaatcttataccatcgtattatatatttttttaattgcgactttaagacatgatttttctctctgtcatataacaaaagtaattctactaaaacctgcccttcactacctgctctcatttgggctttgctgatattcatatcagacattgtctctataaaaacagagagaacctttctcgaataagcaaatttttcatttactgccaatctcgcccaagtcaataaatcctctcccgatttaatacccagaggaaagcccccgatagcctgtattgccgttttcttcaccataatagaaattgaacaaatgggtggatgagagcaacttgctacctcgaaataattggacagtactccatcttctccttcaaaaggcaatttgcggataatagttggagtcacttttccctcggaatcccgaaactcataattacaagcatatacgctacattcgggatacttttgataaagtccatattgtgtcgccaaatactccggcatccactcatcatcggcatcgagaaatgcaatcaactctccacgggcctcctctatcccccgatttcgagcagcagaaactccagcattggtttgatgaatcaaccgaatacgagagtcatcgaatttctcgacttcctccacactgttgtcagtcgagccatcatcgacaaccacaatttcaaaatcttgaaaggtctgttcaaaaacagattgtaaagtataggctatctgcttctctttattatataaaggtataactacggatatcattcgtctatttttctccttttataaggcctaacatcattccataaaatccgaacggataagaaagtgtcgccatagaataattgactacattatcggtgtacatcgtaagagcaaccccggccatgctgctcccggctacgatagcgcacatctttatagatacatcggtatacttttgatataccacaaaactatgcacaataataacaaaaaccgccaacagatataatacgacacctatgattccactgtcacaagacatttgaacatagtcgttatgaggcactttcaaacctccaaaaacgacattactatacatatagttttgaacacttcctatccccgaacccatcagttctttttcattataaaaccgaccttgtaaatcttcccacatggcaaaacgagcattactttcgatatcgtctttcgagatttctccccgctgcaactgttcgatagatacattctcgctatccttaaacattttctcccgtactgaaggtatagcaaaaacagctacaacaaacagtaccaatacaacaaaaattacgggtaacgatttcatcttgtatttaaagaagaaaaatgtcatcaaagccaatgtagtgcccataatactggtacgaaacacccacaccaaacaaggaagcataaacaacacgcatagtaaaagattcttcttcctttcatcggtataataaaagagagccaaagaaaacacacacatcgtaatatagtgtatcgcacttgccgtaccataccaaaatactccgggaaacaaaatccaattcagcattggtattattaataccggtatagaaataaccgccactaaccgggctcctaatccggctttgagaaaaacctctttatcccgcactgccgccgaagcaaaaagcattattaacagaggatagaggtatttcaaaattacccggaatccatatccgggagccggagaataactcaacccgattactaaccaaacaatatataacaaataaagtactatggccggactccattgcggagatcgcttacaaataaacaggcccactatgcaaaagatctctaataccattaagcgaatagccatcaaatctaatgctccgggagccgatagtgctaataatccggtagaaaaagtcaacacccaaaacatctccgggccgtccatcaccatcttctgctcccgatttagcgggttgaccatcactccccgtttcattgtcaaaaacttcaatcccaacagagtgataataagaaaatatatgtagttgagtaaatacatatttaccgcttagtagttatcaatcttttatacaaatcattaaacaactgagaatagcgttcgaaactatacctatgaacataccgtatcgcttttgatgaatatttttgcaacaactcaggagtcgcgatcagcgatatgattttatttgccatatcgtcgattgaaccaacctcgtgcaacagcccgacttctccatcttgaacaacttcgggcaatcctcccgttagggaagcgaccaccacacaaccgttagccatagcctcgatagccgtcagtccaaacccttcgctacgggagggcatcagtacgatatccatgcggcgataccattccgtcaatctctcctgcggttgacgacctgcccactcgacatattcggtacaatcgaattcttgtgcctgtcgttgcattttcacccgcaaagaaccgtcccccacaatcaccaatcgggtatcgggatatcgctttttcacctgtgcaaatgccggaacaacccaatccatacccttaatctcttctaatcggctgacaacacctatcgtgattgggcgaacaaagctcctattctctctcacaatagaaaagccgggaggcaacgcattataaatcgtaaaatggttgcgtttgctcaaaggagtattctcattatacaatcgagatgtcccgaagaaagatcgctcggccagctcggtaatacatgtaaacgcccgcacacaatgtcgttgaataaaatgtaccagccgtaaattaggatagatatcggctgccgtatgtgccgtggtaataatctgacgtacacctaaccatcgcaacaacagaataggaatagcacccggagccatatattgcacatgagctacatcaggcttatacaacttcaataccctgcgtaatcctttgtataaaaaaagtattccccgccaaccattcaatcgcgttccggtagaactcagacaaaccacctcgctaccgacttttcgaaatcggacgaccatatcatcgctatattcgaaatagcatgtcgtcactacctgatgtcctccggcaacaagtgcctgtacgagattcaatgtctgaatctccgttcctccggttaataaacaaggtatgcaaatgagaatagtcatttcaaagcatctaaataaacccctatcgtttccttcgcagtcttctcccaactaaattgagcagccctttttatgccattttccacaaacggttctgtatctattgtattttgatccaatcgccccatcacgtctataagactgtcaaataacggttctgtcaaatatatcgcagcattgccggcaatttcatcaagagagctattatgacacgtaattacaggaacaccacaagccattgcctccaataatggtaacccaaatccttcatacgaagatgggaaaaacatagcttcagccccattatacaacagagccaaatccccatcagatatatttttcaagaaatgaatccgtgtagctacactactatttttaacctctttcaacaaattaagtgggggattaccccaaacaagcactaaatcatgagataaagtttgctctctcgatagtgctatataacttcttactaaaacatctgttcgtttcctctctgcattacaagaaacactcaaaaaatacgggcttgacaattcaaactttgactgtaacttgtctcgtatattcaatttatctttttgagggaaaaataaatcgtgttttattccccaataaattaccgtgattttttcgggttcaattcccatcgtttcaacaatatcacgcctagatgactcagaacaagtaataatgtgcttgcattgccgcataaaaggaggaacaatctgtttcatcttttcatgttcaaaagcttcttcttggactttcataaacagagcatcatgcaatgtcaccacacacttctcgggactatatacatattcgaaattatggggtatatgcatgatatcatatccggtcagacattcttttataggaaaccgagccaataatttatctatcttttcccgatgaggtaaatagagatgcttagttttaaatagcaatccggtatttctgcctcctattcctttcatattttgggaataaagcaccacctcgaacggcaaattctttatccccgccaatgcttgaatcaactctaacgtagtacgtcctatcccatttactttacctgtaacataatacgggacaatagaatttatatcaataagcagtcgtttcatacaattttatcaatgatttacaatgttcttctatcgagattacccgttcggtagaaagatgtgtgctataattggtaaaactatcggagatttcttgcattttttccgcaagagcatctacattattcggctccaccaaccagccgttcacaccgtcatcgatttgcatctcggccccgccgcaacgagtcgccaataccggttttcccatcgccaacgactcggctatattcaagccgaatgcttctaagtaagaagaagaagaagaagaaacgtggtatgagcgaatcatatcgaacactttttccgggggtactttcccatgccataccacccgcttatcggcagcatatcgccttttcaacgagtgttcataccttcgttcggacttgtttcctactccacctatcaaatgcaattcggcattttcattatcgagctgggaaaaggcttccaataaaatatgcaagccttttacataacaaatgcgccccacataaaagaactttatcttaccgtttattaccggaggaaaatccggaacttctttgggtaacggtatgccatgcggcaaaatcgtgattttctctttacttaatccgtttcgctgcatagctcttgatatggcttggcagggcgctatcattcgagtgcaatcactagctatcgcatgccactcagcttgcttacgttcgatcgacaatgccgcttgcccgataggggtgacaaacgggataaaggggagtttggacaaaccccgccctaacgatcgatagacattttgcggtaacaatcgcataaacggataccaatactttccactgcgaatattccgcaaacaacatgctaaacaatgctcatgcgaaacggcaatatggcatatctcgtctttgcaatcgagcaacgttccagccggacaaacgatgccgccatgatgggcagtaacaataaccggaatatgctgtttcttaccgatctccacaacctgtgctttatggctatgggcatgaatcacatcgggacgtatttggacaatcaacgattcaagtcggtctattccattactcccaacctcatacaacatcgtgcctttatagtctctcgtctcaacagcacaatctttgttcacaaacgagattacttgcaccgaatatccctgtcgtatcatctcatcgacaatattctttacataaacctgccctccaccatatgtggaaaagaagtcacccgatgctatttgaagaatttgtatcatatatttctataaccaataattcttgcaggatttcctgccactatagcattatctggaacatcttttgtaacaacagagcctgcccctataacaacgttattccctatcgttatatttccaaaacagcatacattagccccaaaatcaacattattcagtatagtcgggacctctaatggtctatctgtagattttactccaattgtcgtgagttgcctaaaaatacaaccatatcctatatatttagctctaatcctagtgccaaaagaatgaacaacaaatattcctccaccctcaatacaattaaatgtattgggaatataatctgctatataaaaattaggatcagggcgacaaaaaatattttgaataatattaggaatattagaacatctaaaataaaaaatattcctaaatgaaggacagaatttaagtaaataaactaattgaaaataaatattactactataataatattgttttgaccacctttcaatatctaataatatcatctttttattttttttacttacaaatactagtaataaaaaaaaataccaaaatgtaaaaaaaaatattttaatctttaccaccataataaaactacttattttaccttgctatatactttcttaaaattcttttcaaaaaatctctcataccttgactacctatacagagtaagaaaaaatgaatactaataaataaaatagctaaacatattgcatataaaatcaattgcccccaattaataaatggatattgttcatcgaatataaatgaaacaatataatacactataaaccaagataaaatagttagaaacatgtactttaaccaatttccccaatatatagctaccgatattttaaatccttttgtgaaaaggaaataaggtttccagatacataaaatagtagtttgactaattataccacttaataatataccttttaatccccacagataaccacccaacaatgcaactaatacgaatatacaagtttccacaataggggaccaagtatcagaaaaaagcccatacccatataaaaattgtttaatcgcttgatgtgtcactcctataaaaaaatttataagtaacaataataatacagtattatgaagtatatattctcgccccaaccataaagcaataaatggagaaaataaattatacataagaaaaacacatgttcctccaacaaaaaatctaagcgatgtcaactcccaaaaaaccttcattattttatttctatctccctctgaaataagattaccaacacttgcactaacacttccccaaagactaattaaaaaaaaacttatcttatcacttattatagtgtaattcccataataagcaactatctctaatgaaacaaaagcatatataaaaaaaggaattgtttgaaactgcacaaaagaagcaatctgatgcacaaacaactgcttggtatatttcatcacttcgggatattttttgaaaagttgcttgccttgatgtacttcactacgaagccacggataaacttgccggattttccaattgagaataaacgaataaacaattccaaaagttaattcaataatagcccacaagtaataactacctgtgtagtaggccaaagccatttgaatgagaacctttataatatttaccgcttgaaaataggtggtgaccacataatttttttggtcggctcctaaaagcgtttgtttgtagttggcaaaataaccgattaacgaggaggccaagaacgaaaaataggcaaaaaagataatacccatttcgaactccgtattgggaaatatcaacggaagaaagcaagccagtgcaatgcctgcacccaagataataaaacctatccaacgatagagataaccgaacacagagataatctcgttgatctttccttcatcgtgctcgaataggggcttataaagcacataacctatagcgcttcctatccccaattctgccaaattaaggaatccgagcaggttttgcaacgtgccggtgagtcccacaaaatcagctcccagcgtatcgagaaatatcttccgggagaaaaacgagagaataagagtcaggaaatagaatatgagattgacccttgcattcaacaatgattttttgacccgcgattcttgttgaggcatataatataaagatattctatttttattattaccggaagaaagacttaacccttttcctctgaaactatcgtttcttccagcgtctcccctgtcttggatttacatcgaaacaggagcagttttattttcaattctattttacaaatccacgcttaaactattgttttttcctctatctcatcatgggtaataagcaatagcatcaaagtaccaacaggattcaaagcaagaggtaaaagacagataaatttaccccctaaaaatccgtcctattctatgagcaattttatagatgacattacgttttttctttcttccatgttccactccatagccgtaaccgtatccataaccatagccgtaaccgtatccatactttttgctctccatttcgacaccattgatgacgaccgtaaggttcttgaatttattctcccggtagagtttttccaattccggcaaataacggcgatccaacattccgttacggattacatagaccgtaagatcggctacccgaccgatgatagaagaatcggctacgactaatgccggcacgcaatccaatataatataatcgtattgtttcttcaactcttccaccaaaacgggtaatcgatcgctcatcaacaattccgaaggattgggtggtacaataccggccgagatgatatcgaacatcgcatgtatgttactggactgaacgagctcggacacactgttgtttttcccggaaagccaagtcgacacaccgtttttcatggtcaaatccaatgttttgctcaatgtgcgttttctcaaatccatatcgagcaaaaccacttttttattggtcatagccaatgttacggcaaaattgcgggaaacgaaactttttccctcgcccggcatagtagacgtaaacataacgacccgtgcctgaggtgcaacgaaatccatattggaccgtaacaatctgaaagactcggccacactgctggtcttattctcttccacgacaatggcttgttctccatctcggtctttcattaaagggatttcgcccaatataggcatcgacgtataatcctcaatatctttacgccccctcacaccggtgttccacaataatcgcaaaagctgtatcgccaacggtataatgagtcccacgataaaggctcccatcaataacattctgcgagccggggcgacgggcgccgacgaaccgaagggtgactcaatcacccgtatattggcctcggtaatagccaactgcaaagcattctcttctcgtttattcagcaagaatgtatacaacgactctttaatactttgctgacgtataatgcccaaagcctttttctcttgttgagggaccgactcgatatggtcgagagtttgcgactcgacctcccgggcctttttcaattttagtttcagtgtagacagataactatccatcgaggctgtaagattgactcttaccgcggctaaattattgtctaaatcttttaccaaagggttattctcacccgaattagcggctaatctttctctctgtaacagaatctcgttataggtcgttatctgattttgcaagccactatcccctacccccgatacattgggtatcaactgcttactatgttcattatcggtcaaataacgttctaccgcccgtgcgatggcatactcggtttccagctgcaccaattcgtctctcatcttactgctttcgctcataaattgagtggccgctgcatctatactgacaatgcgattcttttgcttgaaatcggtcaattcattctctacgtcacccaactctttactgataatttcgactcgttcattaataaatttagccgtactggtcgcaatgcggtttttatcttcgataatcgtttcccgataaacatcgatcaaagcgttcaatatagcctcggcacgcgagatattcgagtccacgcagtttatttgtaccaatgtcgtacgttctccggccaaagaggtcgaaataaacgaatgataaatatttgccgcagtattcaagtctatacgagatacttcgaccggtacattataataggccgatattttatcggggatatcctctacaataaatcgaccagctgcggaaattatagtatcaccgaacaaaaactcttggccttcgttgtcacttttctccgtacctattttgagttgattcagtaaaaaacgattcccatttaagggcttaatttccatagaaaccggagccgtataagcatctaagaaattcacccggataggcgactcggcatacaactgatcatagtgcaaccaattttttacctgataagtgacgtccaaatgtaagcgtccgacaacttcacgcattaattgatgcgactgcaaaatatagatttcattctcgactccgctacccgatatgcccccatttaattcaagaacagccgacatatcgtttcccgatttgttttcgctcttcactaacattaccgcgcttctcttgtataacggtgtttgcatagctaaataaaaccatgcgaccgacatacatataacgaccgatagcacaatccaataccaattatcgaataccaactcgacaatatcccgcagggttacccctccttcatttttcttatcgttcttagtttcttgaatgagctccatatagagatgttacttatcttttaacacaataatcatagacacaatagacagcaccgatgctacaagagatataatactactaccggcagaaataaacgacaaggtcgagctacctttcactcctatcgatttattaggctgcacatagattacatcgttctgctttaaataataacaaggtgattccaatactttttcgcccgaagttaaatccacggtataagtttttcgttggtctccgtcctcgcgtattaccaatatattatcccgttttcccgagggagtcaagtcacctgccatagtcaaggcttcaagaagcgtaatacggtctcccgatatagtttgcacaccgggactgtttacttcacccattaccgaaaccttaaatccctttatctgtacattcaccacaggatcttttacatattccccctcgatgagcttgttctcgacggcatcggccaactctcttctcgataatccaccggcctgcatctcacccaaaataggaacttctattttcccgtccttatcgacccttaaaccgacagtttcctgtatcgtggtcgatgcccccgtactacctaatacctgactattgctgaatatttccagcaactcaccatctttactactcactgttatgagtaactggtcgtccgggacaatctttaattcatagtcttgtgctatggtttgaggggactgctccaagccatcggctccctgcaaataaaccattttcttagaaggcacgcatgataccaaacctacaagtatcacagccaagagaattttcggaatatatttcatttgtctaaaataacaatttaacatatcaagcctttgaaccagccactttcctattaatctttttagtaagataaagttgcataatggtccaaataaaaatgtctaaaaataataataaatttatatttatacgagtcaataacaacaaattcatggctgcaaagccagcagagattagcaatatcgtaatcatagctgctcgatgcgaaaatcctaatgctaaaaatttatgatgaatatgatttttatcaggactgaaaatgtttttaccgaaacgtgccctatgcaaaattacccgaacaacatcaaataccggtgtaatcagcaaagaaaaagcaactacgatagcatcgggaactcgatgtaacactgcattatcatacatactgaaccgaatcgccaaaatgctcaatataaagccaatagtcaacgatccggtgtcacccataaaaatttttctacctcggtttggatttccgaaaacattataatagaaaaatggaataattgttcccaaagttacgatagcaagagccgcatacagccattccctctgataaataaacaatatagtaaaaaacaacaatgctatgccgctcaatccagaagccagtccatctattccatctattagatttatagcattagtaataaaaacaatagtaaatacggtaaacgggagtcccactaccggaggtaattcataaattccgaagattccataaagattattgatccataatcccgaagacaccaacaaaatggcacagaatatttgaacaataaatttctgacgatagcgaactccgatcaagtcatcggtaatacctgtcaaatacaacagcaataaactactcaacccaaaagatagaacggacgtatcactcactccgataatagagggaaacaattcctccccgtaaattctattcagccctatcatcaaagaaagagtaaaaataacggcagggaaaaacgaaacacctcccagacgaggtattatacccttgtgtacttttcgttcatctggcatatcgaataaatgctttttaaacgatatcaataaaattcttggaataataaaaatagaaaatcccaaactaataaaaaatgacaacaataaaatcgaaatataacccataaaatattagatttaattcatcattttcaatactaataaacccaattttttcaacatattgacccaattctatgcaaaaatatctttatccactaacgcccccactatgaaagaaatcaatcctatctgttaacccaaaatctcaggcgaaagaaattactttattttttatgcattccttaaatatacgcctatatactactgggggacaccgaaaagaaagcttttcccggctctaagaatcacttataacccctctttgacccatccctatctcagtggataatcattattggaagggtaaataaatataacgcttcatacaagagatagattactataaactatcaatttcagaagaattacatttacttttctgtgaagaacaggataaataacaacagaatgattcaaacatatctgcatattttgctaagtactctaacttcacatttttcgcaaaggtagctacatttcttaaaaaacacaatgaaatcttacaaaaaatgctcccattctacaaaaagccagataaatatatagtattgagcagcttacaaattatttatctaatattaaataaatcagcgaaaaacagaaattaaaaatatttaataattacataaaaacacctgacatttatgtatagttcagaaaccaccagacaacagtttatacaacacagtctctctttcatttttgaatattaccgaatgcaacttaatatagtatttacagcatatatatcaagtatcctgtgtaaactacataagcaaaaatcataaatacaccttccacccgagtaatcgtacgtaccttataatatctcccggcaaagaacaacaacaaagaaaccgctaataaataaaataaatcgacattcgttattccacccaagggtaatggagtaatagtagcgctcatgcccaatacaaaaaagacattgaacaggttggatccgatcacattcccgatagcaatctcaggattttttttcaaagcagctaccaccgaagtagccaattcaggaagagaagtccccatagcaacaagagtcaatcctataacagactctcctactcccaacgaccgggctatctcgctcgacccattgacaaaaagccgaccaccgaaaatcaaagcgacaagccctccaacgatatacaataaacaacgccatgtagataacggtctaatttcagcttgttcttctcctgtattatcgtgtgcgatagcaaacgtatacccgagaaatatggcaaaaaagcaaagcataagcaaaccgtccgccctattcagtatattctccgtaccggtttccaaaaacacatcgttagcacaaattaagacaaccacacacgagagaatggcgagtggtatttcttttgtcaatgttcctttggttattgttataggagcaacaactgctgtcacacccacgatcatcaaaatattaaaaatattactgcccacaacattcccgatagaaagttcggcactcccattaatagccgatacgatactaactgtcaactcgggagccgaagttccaaaggccacgatagttagacctattaccagcgacgatatgttaaaccttttggccaatgcagccgctccattggtcaaaaaattagcaccagacaggattaagcccaaacccacaagtaaaaacaaaacactcatcatgaatctttacactaatatttattatatgtaggcaaatatacaggaaatatgcctaatatgaaaatccacctcagaccagagatgctctttttcgtccaatacgacccgaaagcaacttggttcggtcaatcgaaaccagcttttcggggaaaaagaatctttcttcaaaaacaaaacatgccccccttaaaaaacgcctctatcgtcttattcgaataagcatatcttcattaatttatattaagaaatatcagctgtaagaaaataatccatacctttgttcacaaacaaaggggtgcctaaaagcggctgagattataccctatgaacctgatacggataatgccggcgcaggaattgttcatagttctatctttttcaatacggttttatgtgcatccccttaaatgaaacaaaccgtatgaaaacttatcctgtcgtattgacaatagccggttcggacagcagtggaggagccggaatacaagccgatttgaaaaccatgtcggccatcggggtgttcggcacatcggctatcacggccattacggcacaaaacacctgcgaagtgagggacatacaaggtatcgaacccgatatcgtgcggcaacaaatcgaagccgtactcgacgacctaccttgtacaaccgttaaattaggcatgctatactctcgcgcgaccatcgaaacgattgccgattgcctacaacgttatccgttacggaatatcgtgctcgatccggttatggtttctacttcgggttgtcggctaatcgaggaagaagctatctctgctgttaaaacactattgttgccacaggcgacagtcatcactcccaatattcccgaagccgagatactgagcggacttgccatcgacagtgagaaagatatggaaaaagcagccaacagactatttcaagccggttgtcgtgccgttctcgtgaaaggaggacatttgaaaggagcagaatcctgcgacatactctttatgcccaattctgttcctgttcgctacacctcaccccgcatttctacccggaatacacacggaacagggtgtaccttttcttctgcaatcgcttcttatttggcgttgggacacaggttgaccgatgccgtttccctcgccaaaaaatatctcacccaagctttacagaccggagccgacattacaataggaagcggtcatggttcggtaaaccattttttcgctcctcgtgttttaaccccattaaacccgattaaagatgaaaatctatattaatcaaaaggaaatagaagtccaagacaacatttccgtaaaagagttactcgatatgcaacaaatcgccatcgaaggtacggctatcgccatcgacaacaagctggttcccaaaaatgaatggaacgatcggattttaaccgatgggaacaagataacgattatccgggctacattcggaggataacgaacggatttctcgaaatgaaatatataggcattacagaggaacaccccatagaacaggaaaaccgcttaatcaccgccctgctcgacaacggattggatttaatccacctccgcaaaccgaagtattccggagaaaaaacagagcaactgttactctcgattcctccccgctattacgatcgaatagtacttcacgaccatttcgaactggcggaaaaataccggcttgccggtgttcatctcaatggaaggaatccgcattaccgacctctgtcgaacgactatatccccaccctatcccgctcttgccattccatcgaggaactgacggacggacaacgatatgactatctgtttttgagccccatcttcgacagcatatcgaaaaagggataccgttccgcattctcgcccgaacaactgactaaggccgggaaagaaggcgttatcaacgagaaagtcattgccttaggcggtatcacccccgaaaagaaaactgctataaaggattggaatttcggagggatcgccgtactcggtttcctatggcaggaaccgaccattgcaggggttattcgacaacttacccgattaagaaacgattaatacgaacaaaatatgttacaattcattacccaccagacaccccgattcggaatcatagagggagcagtcgccgccttgaacggaggttgcaaatggatacagctccgtatgaaagatgctcctatcgaagctgtcaggcaaaccgcccagcaactcattccgctctgtaaagaacatgaagccatactcgtcctcgacgattatgcccaactggcggccgacctcgacatagacggcgttcatctgggaaagctcgacatgcctgtttccgaagctcgcctgcttatcggcgagaaatacattatcggaggaacggcgaatacctttgaagacatacaaggattagtccggcaagatgccgattatatcggcttgggaccattccgatataccgagacaaaaaagaacctgagtcctatcctcggcctcgaaggttatgcccgaatcatggaacaataccggacgaacgacttgaaaatcccagtggtcgccatcggaggtatcacagccgacgatattccggctatcatggaaaccggagtgtcgggaatcgctttatcgggaacgatcttgcaagccgaaaatcctgaaaaggaaactaaaaaaataatagacctattaaataaatatcgtaaagcatgaacaaattaattatcggaggacgggaattttcctcccgcttattcgtaggaaccgggaaattcagttcgaatgaactaatggaaaaagccatcgaagcctccggatccgaaatgattaccgtggccatgaaacgtatcaacatgacccaagaagccacagacgatatgttgacacacatcgaccgcaatagagtacaatttctacctaacacatcgggagtacgcaatgccgaagaggctgtactcgcagctcaattttccagagaatgtttcgggaccgatttcgttaaactcgaaatccaccccgatcccaaatatctcctacccgatcctgtggaaaccttgaaagctaccgaacaactggcaaaactgggattcgtggtacttccctatattcaagcagaccccgtactttgtaaacggctcgaagaagtcggcgctgccaccgtaatgcccttaggcgcaccaataggcactaacaaaggattgcgcactcgcgacttcttgcaaattatcatcgaacaaagtaatgtacctgtcatcgtcgatgctgggataggtgctccttcccatgccgcagaagctatggaactgggagccgatgctgtgttggtaaatacggctatcgccgtcgccgggaatcccgtagaaatggctatcgcattcaaacaggctgtcgaagccggccgccgagcatacgaagccggattaggcgcacaataccattttgcacaagccagcagcccgttaacctctttcttagattaaacacagaagtaatatggacacaaaaaaaataatcaaagattcttatcccagttccgaaaaaatatatattccggggaaattattccccatacaggtggggatgcgaaaaataaacctcaccgacacagtcaccgtagaaaacggaaaacggatacacacgcccaacgctcccgtatatgtatacgacaccagtgggccttataccgatcccgatattacggtagatatagacaaagggcttccacgtctgcgcgaatcatggattacggcacgaggcgatgtggagcgacaagacgatatcacctcggaatacggccgtgcccgtcgcgacgacccgtctctcgaccctatacggttcaaaaatactccccttccctacaaagccaaaccgggacatgccatcacgcaaatgtattatgcccgacagggaatcgtcacggccgaaatggaatatgtcgccatacgggaaaacttgcaaaacgaacaattaggcattaaaagccacatcacacccgaattcgtgcgacaagagatagccgccgggcgagcgattattccggcgaatatcaaccacccggaagccgagccgatgattatcggccgtaatttcttggtcaaattaaacaccaacatcgggaactctgcgctatcctcgggtatagaagaagagatcgacaaagccgtatggagttgccactgggggggcgatacactgatggatctatcgaccggcgaccacatacacgaaacccgcgagtggattatccgaaactgtcctgtccccgtgggaactgtccccatctaccaagcccttgaaaaagtaaatggaaaagtcgaaaatctgtcgtgggagatttaccgcgacacactcatcgaacaatgcgagcaaggagtggactatttcaccattcacgccggcgtgttgaaagctcatgccgatttggtgggcgaacgacttaccggaatcgtatcgcgcggagggtctattatgacaaaatggtgcgtcattcacaatcaggaaagtttcctgtacacacatttcgatgaaatctgtgaaatcttaaaacaatatgacgtagcgatttctctgggtgacggtatgcgtccgggctcgatacacgatgccaacgaccgttcgcaattcctcgaactcgatgtgttgggcgaactcactacaaaagcatgggctcatgatgtacaggtcattatcgaaggtcccggccatatccccatgcacaaaatcaaagaaaatatggaaagagaactgaacagttgccacgaagctcctttctatacgttaggcccattgacgaccgacatcgcaccgggatacgaccacattacatcggctatcggagcggctcaaatcgcgtggttaggcacagccatgatctgttatgtaacccccaaagagcacttgggattacccgatcgagaagatgtacgtaacggtgttatcgcttataaaatagctgcacatgccgccgaccttgccaaaggatttcccggagcacaaatacgcgatgatgccatgagcaaggcccggtatgagttccgctggaaagaccaattcaatttggcactcgatcccgaacgtgcccttgaatactacaaacaaggctcgttccacgacggtaattattgtaccatgtgcggaccaaacttctgcgccatgcgcctgtcgcaagatattaccgactgtatagaaaaggaatgataaacctgttcatgactcaaacacgtaatatgaaaatattgatactaaacggaagcccgagaagcaacggcttgataagccgaattttggacacgatggccaacgaggctcggcaacaccatgccgaggtagaagtcgtaccggtgtgccggttagacatacacccttgcactggctgcatgagttgccgcagtcgccataactgcgtcctgccagaggacgatgcccaacgcaccctcgccaaaattgtagaggccgatgccctcgtcatcggatctccttgttattggggcaacatgagcggacagttgaaaatcctgttcgaccgactggtctacggcttgatgggtgaaagtccgaaaggatttcccctccccctacacaaaggcaaaaaggccgttattgtaagcactggttccaccccatggcctttcaatatctggttcaaccaaacccgaggtacggtaaaagcactgcgtgaaattctgaaatggagcggattttcagtacaaggtgtcctgcaaaagggcggaaccaaacagcaccatgaactaaccatgaaagaattgcaaaaatgtaaaaccctcattaaacgactaacgatttaaaaaaattacaaaaagatgttttccagtgaattagaaaaatattcttgggaagatataactgcctgcatagcttcgaaacggagtcgtgatgtcgaaatcgctcttggtaaagagcatttacaactcgacgatttcatggcgctcgtctcacctgctgccgccccctatatagaacatatggcggcattgagcaggctctatacccaagaacgtttcggcaaaacgatacagatgtatgtaccgctttatatcaccaattcatgtacaaaccactgtgtctactgtggattcaatcacaataaccccatcgctcgaattattcttaccgagaaagaaatcgaaaaagaatgccgggcaatccgtcaaatgggaccgttcgagaatttgcttatcgtaaccggagaaaatccacgcgatgccggagtcgattatttggaacgagctctacaaatcgcacgtccctacttctcgaacctatcgatagaagtcatgcccctcaaaagcgaagattactatcgcttgacccaatcgggtctcaacggcgtggtctgctttcaagaaacctatcataaagaccggtacaaagtataccacccgaaaggcatgaaatctatcttcgaatggagagtaaacggattcgaccgcatgggacaagccggtgtacacaaaataggtatgggagtgctcatcggattggaagactggcgtaccgatgtaaccatgatggccatacacttgcaatacttgcgcaagcactattggcaaactcgatatagtgtcaacttcccccgcatgcgcccgtccgaaggtcattttcagcccaatgtaatcatgacggataaagagctggcacagttgatttttgcatttcgtattttcgaccacgacgtggatatttccgtatccacccgagaaaacgcaaaattcagagatcacatcgccactctcggagctacttcgataagcgcaggttcgaaaaccgacccgggaggttatgccacttatccgcaagcgttagaacaattttcggtcagcgacgaacggacacctgccgaagtggaacaagctgtcaaagctatggggtatgaggtcgtatggaaagactgggacaaaatattcgatcgatgaacgaaaggtatatccgccaaaccatgattcccgaaatcggggaagcaggacaggaaaaattgaagaatgctaaggtattgattgtcggtataggagggttaggttctcccatctctctatatctgaccgctgccggagtaggacaaataggacttatcgacgatgatatcgtttcaaaaagcaacttacaaaggcaaattctttataccgaggcagaaataggacaatcgaaagtcgagtgcgcttgtcgaagactgtcggctttgaacagttcaactcgattcgagacctatcctaaccgcttcacccccgacaatgcaaatcgacttgtctccgcttacgatatcattgtcgacggatgcgacaatgctgcgacccgttatctgatcgacgatgtctgttcccgcttcaaaaagccctatgtatatgggtccatttcggaatttcggggacaggtttccgtctttaattaccgaggcggatctcgatacagtgatctttatccccgccccgaagttattcccccggctcgtcccggaggagttatcggcactattccaggaattatcggctgcatggaagccgcagaagtgattaaaatcattaccggctatggcgaagttttaagtgggaaacttttcctgctcgacacacaaaccttacaacatgaaatcatcgagatatgattttcgtattatcctcccaaaaacgggctgtataaattgttatacagcccgtttttttgtttccataccgattatttttcgaactacaaatccaataatccgtcggggatattcagatacaacttgcgattatcttcgtctatttcacaaacaaattcatcgacagccggtataagcaacaatcgcccgttatattccacttcaaacaatacattttccgtagaatcatcgatcgagacaatctttcccaactctcctttctcgctatcgatcacagtgaagcctataaagtaatctcccggagcttcatcttcattcgattctttgtaataagacttcgggaaataaacatcgagtaaagtaaatggacgcgcatccgcttcattatctacatcttccaatttaatcaaagccgtcgtatcgctcttaaacctatattcctcgataaaaaacggtacgaatatgccatctatctcacatacgatataagaacactccgtgcggtcgaacacatcatcggtaaaagtaaaagacaactcgcctttcactccatgaggcttattaaaccttcctatccttatcaattcttcccttgtaatcattctttcacttttatttcgtccaaatccacaccggttacaaccgtgtattttccctctacctgcacccatcgagaaagtaaaactttttttcggaactccccgatataccggtacaggctatcgacatattcgggcatggtataatcgagagctttgacatgtacataaatcgtccaactgtcacgggcatcgtaacaaaccgtatcgaacactgcaaccgtcggttcatcggcccggaaccggcgtatctcacacaaataggcatacaacgaatctaataactgccgagaatttcgtcggggaataaccgttacctcgtcgctcccgacggcctcgacaatctgtttcctcgcttttgccgaatcgccaagcacttgtatcacaaaatgacctttttcatcgacatacgccgcccccaaatattttgggaaatccttccattgaaaataagaaggattctctcctatcgcagccaaatatttccgatacaaacggtatccggtagaatcgcaagtctcctctacgggaacttccgttactattgtatcggaagttttcccgccgtcggcacgctcctgtacttgctgcgaacaagaagacaggagcaatcccgccacgacaacacaaaaataccaccctttcatcgatctataaacgggtaatacgtgcacctattgcattgagtcgtttatcgacatcttgataccccctatcgatttggtctatattatgaatacgacttgtaccctcggcactcattgcggcgataagcatggctattcccgctcgaatatcgggtgaaaccatattggtagccctcaacgtgtgtgcgtgagcctgaccgatgactgccgccctatgcgggtcacaaagaatgatttgcgctcccatatcgataagtttatctacgaaaaacaaacggctctcgaacatcttttgatgaatcaagacactacctttcgcctgtgtcgccacaacaaggaatacgcttaacaagtcgggagtcaatcccggccacggagcatcggcaaaagtcataatcgaaccatcgatgaaagtctctatctcgtaacattcatgttcgggtatatgaatatcgtcgccctgctgttccacggttatccctaaccgtcggaaactatcgggaataattcccaaatcgttatacgatacatttttaatcgtaatgtccgaacgtgtcatcgctgccataccgataaaactacccacttcgatcatgtcgggaagaatagtatgctcacacccttttaacgatgaaaccccgtgaacggtgagcagattagacccgataccttcgatatgcgcccccatacggttcaacatttttgaaagttgttgcaaatagggctcgcaagcagcattataaatcgtcgtatcgccttcggccaatacagctgccattagaatatttgccgtacctgtaaccgatgcttcatcgagcaacatgtaactaccccgcaatttatcggctttaatttcataacgctgggctttggaacaataattaaatgtagctcccaacttttggataccgagaaaatgggtatccaaccggcgtcttccgattttatcgcctcccggtttcggtaaaacggcatacccgaaacgagccacaagaggtccgataatcattaccgatccccgcaaagaagctcctttttgaaaaaattcgtcactatcgagataatcgagatttatcttatcggccttgaaactgtacgcattcagacctatgcgttttaccgtcacgcccaaatctcgcaaaagttgtatcaaattatttacatcgagtatatcgggaatattgtatatcttcacttcttccggggtcaacagtgtagcacacaaaacctccaacgcctcatttttagctccttgcggtatcagatcaccatttaagcgatgcccgccttcaataataaaagatgccatactctctttctctattaaggttaatgagtgaaagatacaaaaaaagcggttatttacccgcttttttcgaattattttttgatttacgctgctgcacgaccggttccctcacatctctcaaatgatatgtggatgcatcgagatcaatcacgccatgtgtatactcccgcaaatctttcaaaatcttctcatcttccaccgaatccttattccattgataaaacaactttttcatatgattcgccagcatggaaaccaatgcactcctttcgggtccatcgggcatcgactccgcctttttcaacatctcttccataattttcccataatgacgatactttatgggagaagcctgataaggaaccgactcgggcacggtatgaagattttcttttttgatgatttcatacggataatcgatattcaacttgaagtcggacataattgccaaatgatcccacaatttgtgcttaaagtcctcgatatcccgtaaatgaggaaacagattccccatgatatttataatcgtattggcacaacgggtacgttccgctttgtcctctatggtcatgcagtgatctaccatctgctgcacattgcggccatattcgggcaacacgagtcttttcaattccgaagtatattgcatataatttctattgatataacttttataatattttatttttaggagtcgtggctataaactctttcaggtaaaaaggttcgaaataagccacgtcttcaaattgcccgttacggaaagcacgctcggccaatgccaacatatcggtagccaaaggaactattccttctacaaatatggcattgcgatgtttaatcacatctttacattttgtcgagccgtttcccgcaaatacaatccgacgattgtccaacaagtccgagaaagtatgctcatcgattacatacgcaccgacaggaacgacatcattcaacgcattatcgaaaacagccgaatagacctccatgcgacgggcatcgatcataggacaatataacacatcttcctcaaaatagtttctaaacatggtcgtacaagccaaaagttcgagcgtaggaactgagatgagaggaactttcaatccgaaacaaagacctttggcttccgaaacaccgatacgcaatcccgtataggatccgggaccgctactcacggcaaccgcatccaccttgactcctttatctctcgaaaaatccataatctgttttacatatactcctaacaacgaagcatgcgaaggcccctcgaaattctcgaaatggcattgaacgacaccatcggaagacagggcggcggaacaaacagacgtagaagtctctatatgtataatattcggcataattcaatccgtaaagtatgatttatctcccgatatccggtcggaaaggcgataaaccaacgatgtaatcaacgttaacgagtgtacaaaattagctcttttttttcaatttattgctttctcatcggaattaagattaaatttgcaaaaacatttacagacttatgatacaatcgatgaccggttttggtaaagccgtagtggaattaccgcataaaaaaataactgttgaaataaaatccttaaatagtaaacaactcgatttatcgacccgtattcctcagcaatacagggaaatggagatggaaattcgatccgaaatagccaaacgtctggaacgtgggaaagtagacttcttcgtatacagcgaagctatcggcaaggaagcttctgcccaaataaatattccggttttggaaggttatttccaacaagtcaaagaagcctcgatcaaattaggtattgcgatgcccgacgattggttctccatcttgttacgtctgcccgatgtcatgagttccgaaagtcaggaaatagacgaagtagaactcaacgctttgagaaaagcagtcgaccaagccatctctcaattggaagagttcagaattcaggaaggagccatgttgcaacacctttttgaagagaaaatcgccaacatagctcatttgttacaagaggtagaaccttatgaaaaagagcgcatcgaaaagataaaaggtcggataatcgacgctttgaacaaaatcgacaatttcgattacgacaaaaacagatttgaacaagagatgattttctacatcgagaaactagacatcaatgaagaaaaacatagactagacaatcacttgaaatatttcctcgaaaccctgcaatcgggcaaggggcaaggcaaaaaactcggatttatcagtcaggaaatgggacgtgaaatcaacacactcgggtccaaatcgaaccatgccgagatgcaacgcattgtcgtgcgtatgaaagacgagttggaacaaatcaaagagcaagtactaaatgtaatgtaatggaacaaagaggtaaactcatcatcttttcggccccctccggttcgggtaaatccaccatcatacaatcgttattgaatcgcgatttgaacctgtcattctctatctccgccaccagtcgtgctccgagagggactgagaaaaacggcgtcgaatattatttcatcacacccgatgaatttcgcgaacgtatagcgaacgacgaatttctggaatatgaagaagtctatgccgggaagttctacggcactttgaaaagcgaagtggaacggattctcgactcggggaaaaatgttattttcgatgtcgacgttgtcggcggactcaacataaaaaaatattacggaaaccaagctctcgctttgtttatccagccacccagcatacaagcgttggaacaacgattgaaaaacagagcgacagataccccggaagttatagctcatcggatagcgaaagctgaatacgaattgtcgttcgcaccaaaattcgataaaatcatagtgaacgatattttggaaaaagcccaagaagaggcataccgttcaataagacaatttctcgataaatgataagtaaaacatgcaaccgataaagacagcctttttctccgggacgttcaatccggttcataccggccacctcatattagcgaactacttgtgcgaatatgaaggattcgacgaaatatggctgtctgtgtctcctcaaaatcctctacgagaaaaattgtcctcgaataatgatagacaacgaatcgaaatgttaaatatggccgtgaacggcaattctaagattcggacgaccgatatagaatttaccctgccccgcccctcctatacgattcaaacactcgaagccctcagaaagaagcatcccgaaagaatatttactttgattatcggtgcagacaactggctttcattcaacagatggaaagactatgataaaattatcgaagagtatcccatttatatctatccgcgccggggttacgacatagacgaaaggtcgctgcctgcaaacgtaaaattgtgtcatgctcctatcatagaaatttcatcgacccaaatacgacagggaatttcagaagggaaaaatatgaactattttatacctcgaccggtatacgattatatcataaatcacggactttataaaaataaagactaatggacgaacgtatttattcaaaaaatatcatcgaatttgtaacggtcagtgccgaatattgtgcttttatcgaacgtgttccggaattggagaaagaagaatttctcgataaaatcataaaaatactaccattgctatatctgaaagcaacactattaacaccggaagaacccgaagaagatggattctccgaaaaattcgtcacagagaatatgtacgagagcgttcgggaaaacatagaaagtctattgggggaagacgacagttatctggaagtttttcaaaacgatatgaaatacagtgaaaccccgataatagccaatgtttcggaagcccttgccgatatttatcaagacttgaaagatttcatttcggtatatcgcatgggaaatgagccccaaatgctcgaagctctttacatttgtttcgaaaatttcattacatactgggggcaacaactagttaacgtactccgagcattacacaacataagatacactctggataacgatgatgatgaatgtgacgacaattgcgactgtggacaccatcattctcactccgataattacaccgatatattcggtcatcaacaagagaacggagatattctcgacaagttgaacgatgatttggattaaaaaattatggagaacgatacacccaataaaataaaaatcagtaaagaaatcattgctactttacccatagaaacatttccggggaaaatagtcgtaatcgataatgaaagagatgccgataatgcagtactccaactaaataacgaaagaattatcggattcgatacagagactcggccaactttcaaaaaaggaaaaagcaatcatgtagcacttatccaattatcgacccacgatacgtgttatttgtttcgtataaatcgcataggatttacacctgcgattaagaatctgctcgaaaacgaatccctcttgaaagtaggaatatcgctcaaagatgacttctgtatgttgagtcggctaaacggcggacaatttataccgaaaaattttatagaattacaaaaattcgtgaagaaatacaatatcgaagatcaaagtctacaaaaaatctatggtatagttatcgggaaaaaaatttccaaagggcaacgattatccaactgggaagccgatcatcttaccgaaaatcaacaactttatgcagcgaccgatgcttggagttgcataaaaatatacgaagttttgaaatctggaaaattcaaatctcccatatataaaattcaaccctcgtctttataaaactacaatattatgaaacgatacgacattatagcattgctcttggttatttatttggctgtgatggcctacttcggcagaggtatgcttttgagcggaaattactgggaatattttagtatcatcggtgttactttactcgtcattttcatactcagatgggcaatgaaacgtagagaaaaaatcagagaagaacgaaggaaaaagcaagacgcctctgaacgaagaaccctacgaaacgacaatatatcataaaccataaataaaattcatcggactatgacaaagaaagtactattaacctttttggttatatggttgttttcgaacaccggttcggctcaaatcctaaaaaacacatggatcatcaaccctcaattaagcggctttaatttaggcagtacccacacggaagatacgggcaaagaaacgttcgacctcggactaaaagtcgaagcaggtaatttcattgccaataatttggctattcttgtcgggatcggcggtgacttcgcatggaataaagagtacaaagacaatagcatcgatataatgggaagcattagatattatacgctcacgactctgtttctcggcataaacgcaggatacacccatgcatggtataaacccaaaggaagtgattctcaatgcagagattacctatatgtcggagccgagctgggatatgcgattttcgtgagtcacaacatatctctggatccggccgtatattggaagcacagttttaccgataaattcaaccagtacggaataaaaatgggactttctgtctatttctaagaagttaatatataaaacacataaacacaatgactgaaaaaatgaaccaattgatgaaggacgtcccggctatacgatggacagcccttattctactggcaagtgccatgtttttcgggtatatttttatggatatactatcgcctttacaagaacttttgcaaacatcaagagggtggtctcccgatgcctatggacactatgccggttctgaaacattcctgaatgtattcgtattctttttaatttttgcgggtatcattctcgataaaatgggggttcgcttcacggctattctttccggggctgttatgctcgcaggggcatccatcaactatttcgctgtcagcaatgcatttatcggtagcggagcagaatctctcatgaaccgatttatgaatttacctttggaatggtggaacatcaccccgttttacgagggcatgcctgcgtcggctaaaatgtcggctatcggtttcatgttcttcggttgtggcgtagaaatggcgggaattacagtttcccgcggaattgtcaaatggttcaaaggaaaagaaatggcactcgccatgggggtagaaatggctattgcccgtgtgggagtcgccgtagtcgtcttaggctctccggtcttggccaataaaatctctcctatcgatgtatctcgtcctgttctcgtagcagttatattactggcaatcggactcatctgttttatcacttatgccttcatggataaaaaactcgaacgacagatgggcgaaagcggtgaggaaaaagacgatcctttcaaattaaaagatctcaaactcattttttcgagcaaagtattctggttagtagctcttctttgcgtactctactactcggctattttcccattccaaaaatatgcaatcaatatgctgcaatgtaatttaggatacacagccgaacaagccggttgggtatttttcgtattccctttgggtgcagcggctattactcccattttaggaaattttctcgaccatcgtggtaaaggagctactatgctcatcttcggtgcactgctaatgatcgcctgccatttggtattcgcattggtgttgccgaccctgaaaggtactaccgcagcagttatcgtcgcctatttatctatcatattattgggaatctctttttcattggttccagcttctttatggccgtccgtccccaaacttgtagacaacaaactattaggttcggcgtacgccgttattttctggattcaaaacataggattatatgcattccccatgattataggtgcagcattgagaatctcgaatcccggcataaccgatccgttacaatacaactatacaacccctatgcttatatttgcaagtttaggtgtgttggctcttctcttcgggttatggttaaaagttgaggacaagaaacgtggatacgggctcgaacttcccaatattcaaaaataatgataaaagaaaaagaataatacattagttattagtccaatataatcggcaatagagtgtaaacatctattgccgatttttcttttcttcccaatcaaactataatcagtagttaataaactattttatttagttttattaactataataattagttgaaaaactaaaacatttagtttatttgtatcataaatagaaaaaatatgaaaggacttacatcgaaagaagaggaaatcatgaattatttctggcataaagggccattattcgtgaaagaactgttggatttttatgacgaacccaaacctcacttcaatacgttatcgaccatcgtaagaggactcgaagaaaaaggctatgtgtcacacaaagcatatggtaaaacctatcaatattttgctgttgtaagcgaagaatcgttcaaaaaacggaccttgcgacaagtcatacgtaaatacttcaacagctcctatttgggagtcgtttcctctttaatcgaggaagaagatatttcactgaaagaattgaaagagcttatcgaaaaagtagaaaaaggaaaagcagaacaataaccaatcactaccaatgggcgcattctttgtttatatattaaaagcctctgtttatctagccattctgtatctgttttacagtatattgctaagtaaggaaacattttaccgctacaatagaacagcattgctactattgatacctctatcgtttattcttccgctatatccggttcatactgctgttcccgaaacgtattcaaacactactatactcgacaggctgccggcaatatcttatatcgaaaacgaatcacaaagtaaaattccgataggtattatcgcggtactaagtatctatctcatcgggattttatactttatcactagatatgtctgcacaattataaaacttctgcgactgattcggagcggggaaaaatataccgacagcgacggactttctcttgtcgttatctcccaatccattgctcctttcagttggttcgggaaaatagtcatttcaaaagccgacttccaaaaccatcgccgagaaatactcctacacgaatctgcacacattcgcaaacatcattcatgggatttactggctgccgatctctgtataggattacaatggttcaatccggccgcctggttactgaaacgagaactgcaaaccgtacatgaatacgaagccgataattacgttttggaacaaggcatcgatgccaaacaataccaattactgttaataaaacgatcggtcggttccaagttttattacataaccaatcactttaatcacaataaacttaacaaaagaattaccatgatgttaaaaaagaaatcaaaccgcaaagcgaccttgaagtatctctacgtcataccggtcgcattatgtaccgtttcggtattcgcccaccccgaaatctccgatgaattaaacaaagtatcctcggtcgatttgagtaacttgacagctatgatcggtagttccgaaaacaccgcaaccataaagaataaagagatagaaatatccgggtgtgttttagacatagaaaccaacgaacctatcgtcggagccaccgtcttggtcaaaggcagcaatacaggaacagtaaccgatctaaatggaaacttctccttaaaaacacccataggaaaaactttgctcatctcttatgtcggtttaggctcggccgaaatcagttgcaatgacaaagacaggcaaaatctgaaaatatacctcggcgaaagcagcgaaaagaataacagttcgaaaattatcatagtcggtaacaaaaccgagccgaacacttcgatcggcacgaaaggaaaaatcaacagcataaccattacgacaaaagacagtgtagaaaacaataaacagaaaatcgatacaaaaggaaaaattagcaatataaatgtagatatccaaaaagatggttcggtcatagtcgatgaaaacaataccagagtcttttacgatcctatatatattttagacggtaaaaaaatttccaaagacaaattcaaaaatctcgatgccgacaaaataaaatcaataactgtcctcaaaggagaggaagctatcaaaagttatggaaaagatggtgaaaatggagcccttatcatacaaaccaaaggaaatactgcaacttcgacagatccgataaaaaccataacgattaccaagaaagatacttctgaggatatcatgaaaaatacactttgcatcgttgacggaaaaaagatttcggaaacagaactaaaaaatatagatcccaacaatatacaaagtataacagtcttgaaagatgaaaaatcgaaggaagaatatggagcgaccgacaaagattgcattatatggattaccttgaaaaaataatatgactcgacgactgaatgcaaaaaaggctgttttctattttgaaaacagcctttttgttttattggtctacttttctgaatttcatttttgcccgtacaaactctattacggcaggtaacaaagatacaaatataatcgcgacaatcagaagttttaaatttttctgaacaaaaggcaaatcaccgaagaaatagcccgcataacaaaaaatcgctacccacaaagctcctccgattagattatacatcatgaaataataatagtgcattttccccataccacccacaaaaggagcaaaagtacgaacgatagggacaaaccgagctataattatagttttccctccatatttttcaaagaaagcatgggttttctctaaatggctttgtttgaaaatctttgaattggggttactgaatagcttcttaccgaaaaaatggcctattgcataattacaagaatcgcccaataccgcagcaacaaacaaaataagtaccaaaacatttatttctaagggaattcctggcaacgctgtaatagccccagcgacaaaaagtaaagaatctcccggtaaaaagggtgtaacaaccaaacccgtctcacaaaaaataatcataaacaatatagcataagcccaagtatgataatcctgtactatctcaatcagatgcttgtctatatgcaaaataaagtcaatcaaaaattccataaatccatatataaatacattaactttattggggcatagtcactttgaaataaggattttctacatgctgttcaaatacgatacgcttcatatcttctacacgatcgggatattgggcagccaaatcacaatcctcatgaatatcatcgaccaaattatacaaatgacatttacccttctcaacaaataacttccaatcgccttgccgaacagcaatttgatcggtctcgcaaaactcccaataaagaaactcatgattcttttgatgtttgtctttacccagcaaggtaggtttgaatgaaagtccatcgaaatagtctttcctattctctccatatcgctcgatatgattcacccctatcaagtcgcagaaagtaggcaatatatcataaaacgccaactggtggtcattgacagctaccgggacatgaccgggccaacgaacgataaaaggaatacgtatacctccctcatggcaagaacgcttgattcctttcagtttcccatctcgtccaaaaaatccggggtcggctcccccttcttcgtgagggccgttatccgatgaaaaaataacgatggtattctcatcgagccctttctctttcaattttttcaaaatctcacctacataaatatctaaccgagcaatcattgccgcaaactgtgcatgggtatgagtcacgggattatagcgcccaccataactgccattaaacacaccggtttcccccaaccgttctcgatagtaatttagaagagaatcttctggctgtaccaattcggcatgaggtaatgtgtaagtgaaaaaaccgaagaaaggtttgtctcccgactgacgatccaaccaatcgattgcagcttcgtgaataagatcggccgaatattgaggccgtaaagcataaccggccccccacatgggatatttgatattctcttcgagcgtcacacgaatagtcgcagtgtcgcccaaccgggaactataccgattcaaaaagttgggataatacaagtgagcctgaaattgacagatatatccaaagaactcatcgacaccacgcttgtccggagtagaaacagagccttcatatcccccggcccatttaccgaacattcccgtcctataaccgttttctttcataatttcaggaagaataacacgattgggatcataagggtgttggcctacgatggcatagtcggtattaactccataacgcacctcgccactatctcgccaatactctttatttcctcgtacttctccgtgtccggtgtgctgtccggtcattatacaagcccgggaaggagcgctaacagggctacccgaataagcctgtgtaaatctcataccctccgaagccatacgatctatattcggagtctcgatatatttctgcccatagcaccctaaatctccataacccatatcgtcacataaaataaaaacgatattgggcttatcacttttctttgccgaaaatgcagcgaaaacagaggccaacattccgcctccaacaaataataaccggctatatttcattgataattacctcgaaaatttataatatcttattctttttcggttcaaatataagacgaaagattcgattcctaaaacataaaacttaaaaataattcgagtaccgaattattgtattccctatttttactaattttgaaccgcttactaaatctatctttgatacaatcatgaaccaatctctttacacacctttcgaccggatattatatatcatgaccaagccggtgggggcaatttgtaatctggcctgcacatattgctactataccgaaaaagcgaaactctatcgggactctcccaagcatatcatgagcgaaagcctattagagaaatttatcaaagaatatatcgaaagtcaggcaaacgaccatattttattcacatggcatggtggcgaaaccctaatgagaccgttggatttctaccaaaaagtagtacgacttcaagctcaatacggaaaaggtcgaattatcgataacagcatccaaaccaacggaacattactaacagacagctggtgtcgttttttcaaagaaaataactggctggtcggtatcagtatagacgggccacaagaatttcacgacgaataccgattgaccaaacagggaaggccctcattcgtaaatgtcatgcgaggtataaatctgcttaataaacatggcgtcgaatggaatgctatggcagtagttaacgactttaatggggactatcccttagatttctaccattttttcaaggacatcaactgtaaatatatacaattcacacccattgtcgaacgtattcggcaacatgaagacgggcgcatattagcctctcccgatgaagaatcaatagacggagtaacagacttctccgtctctccggagcaatggggcaactttctttgtacgatattcgacgaatgggttcgaaatgatgtaggagaatactacatacaattattcgatgccactcttgccaattgggctggtgtaacacccggaatatgctctatggccgaaacttgcggtcatgccggaattatggaatttaatggagatgtgtacagttgcgaccattttgtatttcctgagtataaattgggaaacatatacacccaatctttaatcgaaatgatgaatagtccccgacaaattgctttcggtcaaaacaagcgcaatgctctgcctcaacaatgcaaagagtgtgattttctatttgcctgccacggagaatgccccaaaaataggttcgcaaaaacggccaccggagaaccgggattaaattatttatgcgcaggttatcaccgattctttaaacacgtagctccttatatggacttcatgaaacacgaattggataatcaacgcccaccagccaatgtcatgcaatgggtgaaacaaaatccccccgacaaatagaaaaaggctttataccgaatcggtataaagcctttttctatctttcaataaaattattccatataacagaatacttcataggccgcttcgttccaactcacagggcagccctcttcgcgagattctggaacaatgcgtatattcaaaaccgatttgtcgcgagtaagagattccggtatttcaaactcatcttcaatccaacgcttgtacggattactgtccgccaaataccacacgccggcatcctgtccatcgacccaaactctcgcacactgtctgggaagctcctgatcgctgcatcgacgcaatcttactccatgattattcgataatacttttacacgaaacgaactctctccggtaaatttatgaaccatagccgtaacttccacatcatcggcatccccctcgaaacaagaagttagcatctccacagatacatctccttctactttatatttatgtcgtttcaacgactttttcgaggccatatctatgctatcggtcttaactaaggaaactttatcctgcccataataaaaaacaatccccagatgttcgagatactggttattgctctcaccagactctatattaaaatccaattgcgaataaaatggatagctatcacctaaacacaatcgtgtcatcgaccagggattatcgctcagtccgtcataaccgcccgacggattgcactcggccggagtcgggaatccccacccgtagcaaatataactttccgaaccatcgctctcaacctgcggcgtcttaatcccatctatatgtattcttacatctccttcacaagtaataatatgaggacgttccccataacaagtcacatgagcggcaaccattttcccggttccttttatcgacgcgatggggctatctgcccccggtgtatgtttacgagtataatagtcggaagaacgaaagtaaccgctatactctctatcatagctattctcccctactcctacttcaacaaagcccaaagtaacggtctctccgctcctattctccaacattacatgggctcgttcccaaaacggcatagggaaataattataaaaccaaccgtctgtcgtcgctcccattaataaataccgggtattattatatcctaaggaattaccgaaaaaacaaccgataggacacagaacatcttcctcttcgtgattatcccacttcacacgtatccatacatcttgtaatctatcgggattcatatcagccatataaagtttcaacgaattgatgacacccccctcatgcacatctattatagacaatgactccccggatgctaatttcttttccgacatacgaaacattctatccttaccgatcttcggatcgactcccgtctgtttccactgacgaaccaaagaactataatcctcctttccggtaaaagtctctatcccttgcgcagtgggataactgtgatacacgacatgtccccagccaccttgtcctttatcccggtgagggccttcgagcttaacgctcgaagtgattcgacagccattacgaaacggcataggaacaaaactgcgaactacccggatagggcctcgtccattatccaaagggccgatgtaacatgatgcttgtggttcggtaaaaggatatttctctccgaactccgacaaacgaatagtaaaacggggggtctcctcaccatcaaagtaaaatcgaaatacgggttcttccgaactcagataacgatgttgtaccatattataaatacagccggctcccgccacatcgaatattacccactctcctttcttatcttgatacaaactccaatcccaatcggcattaccaccttttttatcgatactgccctcgtacttcactttcatttcccgatccaatactggaaatcgagccacattggtcatgcgagataatccatacgattttgaaggaacagtttcggagtatgcatttccagtcacggaaaatgggaataaagcagtcactgcaagtaatcttataaaagcttttcttttcatggataaaattttaaagatattttcgatgtacaaaaatacctctgtctcgcaaatcaagacaaatactttattatctattccttatacttttatccacaaaaggccgggtatcgatatacccggcctacactttctcgaaattttagattttattctttcctcactaacaatactacattctctacatggtgtgtatgaggaaacatatcgaccggctgtacccgctcgaccttgtattttgcatctaacaaagataaatcgcgcgcctgagtggcgggattacagcttacataaacgatacgttcaggagaagcgaacaatatagtcttaatcacatcgtcatgcatgccggcacgaggtggatcggtaatgatgacctctggacgaccatgctcctctataaaatcctcggtaagaatgtccttcatatcgccggcataaaacaaagtattatccaacccgtttatacgggcgttttctttggcatcttctatcgcttcgggaacatactcgatacctaccaccttacgggattgtcttgccacaaaattggcaatagtgcccgtgccagtatatagatcataaaccaactcggttcccgtcaatccggcgaactctctggcaaccttatataactcataagcctgttcggaattggtttgatagaaagacttcggtcctatcttgaatcgtaatccttccatactttcccaaatataatctcttccccggaacacacaaacttcctgatcggcaatcgtgtcgtttcgtttttgattgacaatataaagcaaagacgtaatctcggggaacgtatccgctatatgttgcatcattcgttcgatacgcaccatatcgggttcgaaaaatacgactatgagcataacctctcctgtcgaagaggtccggataataatattccgcatgaatcctgtctgctccctcaaatcgaaaaacggataatgattatcgatagcacattgtcttatcgagagtcgaatgcgattggatatatcgtcctgcaaccaacacttttttatgtcgaggaccttatcgaacataccgggtatatgaaatcccaacgcattgcgacagtcgaattcctgttccgtctgcaactgttcataagtcaaccacgacttattggaaaatgagaattcgagcttgtttctataatattgttgcttggtcgaaccttttgtaggtaagatttccggcaaagggattttacctatgcgggtaagattgtcttccacttgctgccgtttaaattgtaactgatagtcataagccacatgttgccatttacacccgccgcaaacaccgaaatgctcgcaaaaaggatttacccgcaaagaagaataagcgtgaaatttcacgatacgtgcctcggcataattatgcttcttacgcatcaattgcaaatccactatatctcccggtgctgcaaaagggacgaatactaccaaatcgttcactcgtgccaaagccttgccttcggctgctactccggttatttctacctgctccaacaagggtagctctttcttttttcgtgccaaaacaaaaaattaataagttacaaagccaaacaaaacaatacgaaccgaacatctaaataaattcggctatgcaattatgcagaaaaccacaggctccacattcggcaaagataagtatttttcacgaaagagacaggtaaagcaaataaatagtgcacagcgttaaaatttgtagcaaaatatttttgtggtttgcacgaatcctttatttttgcgtattgtttctatacaagattttccgaatgggtcacaaagtcgaataaaggaaacaatatttatacaaaatatcatatacttatttatttatgaaaagagtttatacttttggcaacggtaaagcagaaggccgtgccgacatgaaaaacctgctgggtggtaaaggagccaacttggcggaaatgaacttaattggagttcctgttccccccggattcacaatcactaccgaagtttgcaccacatacactcagcaagggaaggaagctgttgtaaaagaaatcaaaggcgatgtggaaaaggctatcgctcatatcgaaagcctcacgggcacgaagttcggagatgcctcgaatccgctattggtatcggttcgttcgggagctcgtgtttccatgcccggtatgatggacacagtattgaacttaggtatgaacgacgacgccgtagaagccattgctaaaaaatcgggaaatgcgcggtttgcatgggattcctatcgccgattcgtacagatgtacggcgatgtcgtactgggtatgaagcctaaaacgaaagaagacatcgatccattcgaagaagtgatggacaaagtcaaagaggccaaaggtataaagagtgataccgaactccaagtagaagacctcaaagaattagtaaaactctttaaagccgccgttaaagaaaatacgggaaaagattttcccgcttctccctgggaacaattatggggtgctatctgtgccgtattcgacagctggatgaacgaacgcgccattctctaccgtcgtatgaaccagattcccgaagaatggggtactgccgtaaacgtgcaagctatggtattcggcaatatgggaaatacctcggctaccggtgtagcattcactcgtgacgctgctaccggcgaagatatctttaacggagagtacctcatcaatgcacaaggagaagacgtagttgccggtgtacgcacaccccaacaaatcacactcgaaggatctcgccgctgggcagcattgcaaggtatatcggaagaagaacgcgcaaccaaatatccttctctcgaagaggccatgcccgaatgtgcaaaagcacttatcgaaactcaacaaaaactcgaagactacttcaaagatatgcaagacctcgaattcaccattcaagatggcaaattgtggttattgcaaactcgtaacggaaagcgcaccggagccgctatggtaaaaatcgctatggatatgctccgcgcaggaatcatcgacgaaaaaactgccttgaaacgcatggaggctcaaaaactcgatgaactattgcaccccgtattcgacaaagatgccatcaaacgcgttaaagtcgtagccaaaggacttcctgcctcgccgggtgcagcaaccggacaaatcgtgttcttcgccgacgacgcagaggcgtgggccgaaaaacggaaaaaagtaatcatggtacgtatcgaaacctctcccgaagatttgcgaggcatgagtgtggcgcaaggcatccttactgctcgtggcggtatgacttctcacgcagccgtagttgcccgtggtatgggtaaatgttgtgtatcgggagccggtgaaataaaagtcgattataaagcccgtacggtagaaatgggcggaaaaatctacaaagaaggcgattggatctctttgaatggttccaccggagatgtttacgacggacaagttcctaccgtagacgccgatatgagcggggatttcgcagccattatgaatttggctgaaaaatatacccgagtagacgtacgcaccaacgcagatactccgcgcgatgcagcggtagcccgcaaattcggagcaaaaggtatcggattatgccgtacagaacacatgttcttcgaaggcgaccgtatcaaagccatgcgcgaaatgattctgtcgaaagacgaagagggacgtcgccacgcactcgacaagctgttgcctatgcaacgcagcgacttcgaaggaatattcgaagctatggacggtctgggtgtaaccattcgtctgctcgatcctcctctacacgaattcgtaccgcatcaattggccactcaaaaagaattggcagaagagatgggtatgagcatcgacgaagtaaaattagcttgcgatgctttggaagaatttaaccccatgttgggtcatcgcggttgccggttaggttgtacctatcccgaaataaccgaaatgcaggcccgagccatcatcgaagctgctttgaacgtaaaagcaaaaggtatcgacgttcaccccgaaatcatggttccccttgtaggtgttgtagaagaattgagaatgcaagccgaagttattcaccgtaccgctgcacaagtattcgaagaacgcggcgacacggttgcctacaaagtaggtacgatgatcgaggttccccgtgcagccgttacagccgatcaaattgccgaagttgccgacttcttctcattcggcacgaacgacttgactcaaatgacgttcggctattctcgtgatgatgccggtaaattcttaaagatttacaaagaaaaaggtatcctcaaaaccgatccgttcgaagttctcgaccaaaaaggtgtagggcaactcgtacgcatgggcgtggaaaaaggccgttccaccaaaccgtcgctcaaagtcggtatttgcggtgagcatggtggtgaaccttcatctgtgaaattctgtgccaaactcggtatgaactacgtatcttgcagtccttaccgtgtacccatcgcacgtgtggctgcggcgcaggctgctatcgaagattaaaaagtcctttgataactctataaaaaaggctaacagataatgttagccttttttatatcccctcaatatcgaccctttcatacgataataaaaacactgtaatcaaaaattcataccgagagaagttcagttctcctgtttttaagtacctttgtttcatcaagtaaaacagatcgaaatacaaacacgatgaaaaaaacactactctttattagccttttaatcctttccgtcttatcaacacaagccactcggcccaaatatgtattctatatcatcggcgatggaatgggcataaatcaagttaacggtactgaaatgttttacggggaactgaccagtaagacaggacccttaccgctattgttttcgaaattcccttatacgacttttgtaagcacatactctgccaatcgaggagtaacagactcggcagcagcaggtacggcattggcctgcggtgaaaagaccaacaacaatacgatcggtgtggatgcagacagtctacctatatatagtatagcggtggcagcacaaaagaaaaacatacctgttggaattattaccagcggagaaatagacgatgccactcccgccgcttttttcgctcaccaaataaaccgtaataaccgttacgaaataggagtcgatatgctcgccgccggatttgatttctatgcaggagataaatttacacaaccgtcaccagaaggaaaaaaatctctatacgatatgattccaaaagccaactatacattggctctcggcatacaagaatacaatcgccaatcccaggtagcctccaaaatgattttatttccccaaaaagacttcccttacgccatagaccgtaaaccgggagatatttgtttagccgatctcacccgatgtgcaatagactttctgcaacaaaaaggaaatggtttctttttaatgatagagggctccaaaatagattgggcaggacactcccgtgacggagctaccaatttcagagaaataaaagatttggaagaatcggtaaaattggcttatgatttttatagaaagtatcccgatgaaaccctcattatcgttacagccgaccatgaaaccggaggcgtagtattaggcaacggaaattactcactcaacctgcaagcactccaatatcaaacgatgagtggaatagcgtttacaaaagaaatagaaaatctgcgtaaacaaaacaccgaaatttcatgggaaaccatacaaaaggccctatcccatgcctttggcttttggagcaagctcgacttatcccccgaacaagaagcacatcttaaaaaaatttacgaagaaactatacacaaccaacaaggggacttaataaaatctctatatgaaaacaatgaaccgatagccgaagccgccaaaacgattctcaacgaaatagccgaaatcacatggtcttgcagttctcacacagctggttatgtcccgctctatgcgatcggtttaggagcagaaaactttcaagggaaactcgacaataccgatgtacccttgctaatagcccgaattgccggctacgaataatacaaagactaagaaaagaaagcctatctatatataagattttttagaaaaaacattgtaaaataaaataaaggaaataactttgtcccttgtaatcggtttgcttttatcgcgttcgataaagcaatgaaaagggaatcgggtgtaaatcccggacagacccgctgctgtgtagttcgatagattttagacaaacaactacaatgccactaatccaatgagattgggaaggcgtctaaaatagaacaagtcagaagacctgccggttacataataaaatttatctcttcgcggattaggagataaaacgaatacttttccgatagaaattttttgcgaaagcaaaaaaatacaccatgttatagaaacacgcttttctataacgtagtttatatatatgtaaaatgatgcagttatgagaagaatgattccttacagtgtggatataactgggaattttgtttattcaccgcaattaatcgaagcacgcaaacaagttcaagaagaacttctaaatgtagcacaattactggaaatcgaaaataaagaaatccaacacattgtcgacacatgcaaacagataggtttaaaatgcgttaccgatggggattatagatcaaacggatatacggatttttttcatcatcttcaaaacatttccaagcacgaaacagaaccaaacgatacgtcagaagaaaatgataaatccgttatatgcgggaaaatagacttcgacaatcattttttatcgacaccacctgtcacagagcactttacctatttgacaggaattattggaggcgacatgtatgcaaaagctctactaccgtccccaatgactttattagctgaattaatccgtcctgagaaccgtcttaatacaggaagatattatcccgacatcgaagtgctctcccatgatattgcacagacctaccaaaaagtaattagagaattttacaatatgggatgccgattcctacaattcagcgactatacttggaacttaacaggaggctgcgatattcaacaaatatccgaagcaaataataccgacctcgcatctctgtctaccgtgcttgctcgtttgaccgaactctgcttaaacgacaagcccgacgatatgtgcatatccttacaattcgacgagaaatggtggaatacccgagatcgagaaaaaatagcagaaatactactctctacgcaagcgaatgccatagctttcgacttcggtaatagggaaaatgaaaatatagacttttctatcttgaaacattgtcaaagcaaagacgttatattagggcttgtatcgacttcaagtagccaaccgatatctaccagcactatcactcatcatatcgaaaatgctgcacgccttctaccattggagtctcttcatctcagttgtcaaggcaatttcaggaatttatcgggaaacagttcgatttcagaacaagaaatgtggaacaaaatagcgacaatgaaaaatattgcaaaaaccgtttggggagaataaaacgggcttcccggtttttctacctttatatatgcaaaaagtctacccccacgaatttgcgattgaatcgaaaatagagtatggttcgacatgaaaaacaaatatatttgttttatcctgctcttatctttcactatctttgcacagtatgcgaaaataggatgcggttctgcatagtcaagtcggaaatgcaatttccgcttgcctttgcactcacctttcactatctttgcacgtcgaaaaaccagtcaatacaacaaaggtgaacagtatacacgaagaacttaaagccgtatcgcagttcctttcggaatatgctacatgtctcatggcttcgggagtacatacgtcgagaattgtacgcaatacagcccgtatagccgaatctttcggttttgaagcacacatgaccttatttcacaaaacaatcataatgactttgcggaataaggaaaatacccatgtatacagtatggtaaacacagcaaaagccggcgctataaacttcgaaatcaattccgatttgagcgctctcagttgggaagcctatgataaccatctccctctcgaccagctatgggaaaaatatcatgccattacaagcaaacctcgattaaatgcatggctggtatgggtattagtgggattcgctaatgcatctttctgccggttattcagtggagactggatcgccgttgcagcggtttttgttgcgactcttgtcggatttcgtctcaaacaagtattagggaaacatcatatcaatcactactttatatttacaatatcggcgtttgtcgcttctttaatagcctcggtaactatgtggcagcaatggggaaacacaccggatatagctatcggtgctagtgtactctatttgattcccggtgttccattaatcaatgggattatcgacattatcgaggggcatgtattggcaggaacagcacgactcatcaatgcgtttttactaattatttgtattgcatttggaatggctatcacattattgatgatgggaggaaaactattatgacagaatggcaattcataggttccgtcgccgccgatgccatcggtgcagccatagcggcaatcggtttttcggttatatccaatcctcctcgtcgagttatcccgtgtacagccatactcgctgctatcggccacagcatacgattcgtactactgcaatacgccggattagatttagcctctgcatcattcatcgcagcattttctatcgggcttctcagccatttttctgcctacaagctcttctgcccggccacggtactctacataccggcattgttaccgatgataccgggaatgtatgcctatcgcactgtattttctcttatcaaattccttcaaagcagtaataacgataacgaagcaatccattaccttttggagattttcaaaaacggtataacgacagcctctgttttattcgcattagctgtcggagcaactatacctatattcattttttacaaacgagctttcacgatgacgagggcctcacgtcgaatcaagaaataagccgaaacatattttttttgttatattaatatcatactttattaaaatagtactttatttatataagtacacgcccgtatctttgtggataaatattatttattaattaaaccatgaagacggatatgaaaaaaacaatcctcagtacattatgcttcttactggtttcttgctttatgttttttgctgatgcaggaaccagaattgtcgtattaggctcatcgacagcagccggagcgggcgtctccgactccaatagagcttgggtaaatcagtatcgtacctacctgcaatcgatagaccctaccaacacggttaccaatctggccaaaggtggttataccacatgtgcgatcatgccgaccggaaccgatccctacaacacgggaaaccatattctcgaagtcgatacagaaagaaatattaccaaagcgctcagcctgtcgccgaacgctatcattatcaacatgcccaccaacgatgtatcgaacggtattcctgtcgctacgcaaatgaaacatttcgccactatcatagatttggcgaaagctgctggtgtaaaagtttggattaccacttcacagccccataatttcggggaaaagtatgatggtccatacagcgaagaacatcaacccgacatttggaagcaagcagcaagagatcaattcaaagaactgacagacagtatattgaataaatatggcgaatacgcactcgacttctacactcccatagcgaccgaagacggatatagctttatacgccccgaatacgattctggtgacggtgtgcatttgaatgatgccgctcatgacattttatttaatatcgtcaaaaatgccaatatccccgaaatagcagggagtaccccggtagaaatatctacgactcccatctatattaacttcggtcctgccgaagccggactcgatagctggaataatgttaacaaccaagccagcggatatagagtcgacatgctgaatgattccactggaaacgcaacgaccgtttcgatagaaattactaccggttttacccatgcggccaccaacggcagtaactccactatttgggacatgaacacagccatttcgacaagtaatttcagttccaatggagaaaatcctgttttgacaatatctggcttaaacccgactgcaacttattctttccaaactttcggttctcgggcaggcgatggaaatagagaaacaacctatacctatgcgggagaaaatagcggaagtgcgaccatcgatgcagcttccaacacttcgtcggtcgctaccgtaaagggcataaaacccacggcacaaggagtcgttgtattgactatcggtaaaagcagtaacaacacttcgggattttcctatatcaacgccatgcgaatagtcgctgaaaaaggagaacctcaacccgatgtacccgaaggggttatccgagtagacgttgccgggactctatcctctctgcttcctgccacaaccgatacgatcacaacacttattttacaaggcgatttaaatagctcggacataaaaacgattcgagaacttccttctttgaaatatctcgatatgctgaatagtaaaatcgtgtcgggtggcgaagcttatttaaacggaatgaaaaccgtcgaaaatgtttttcccaaagaaatgttcctaagcaatacagtcatcgaaaccgttatcttaccgaaagaagctgttgaagtcgcctatcacgcatttttcggttgctctactctgaaaaaagtcgttctaccggaaactgtacgtcgattcgggaacgatgttttcagcgggtgtacaaacttagaagaaataaatatgccggccattgccgaatctttgggaaccggtgtattttataattgtaagaaactaacctccatcagcattcccgaggggataacaatcctccccggaggtacattctacggctgttccactttggaaagtgttaccctacccagcacccttgaaaaaatagacggagattggattttcgcgaactgtcatgcgttgaaagctattgctttccccaaaaccattcaatcgatttcaccggggacattttacgactgccgctctttgtcgacaatcgaatgtaaatcgctcactccaccggttacagctactggtaacggcgactccccttttaccggagctttcaaacccgaaaactgtacactcaaagttccttttacgtcgatctcggtttataaagaatctagcatttatgggatcatgaacacaatcgttcctttggcgaatatcacagccgacaatgaggaagtttcaccggagactaccgatctattagcgacagctaaaaagataaccatatcggggtcaacacctgatgctctggaaatacaagcgttatttgcttcgaacgaaaaagtcacatctatcgatatgaccggagttatcgaatatttcgaagtccccgttgcagcaaatcccaactgcttggtctatgcaccggcttctgcccaagtcgaaaataacaacgtagttattaatggaaccgctaaaaaaatcgtgttgaccgatgcaatgcctttcgaagcccccactgcatttcatgccgatgccatcagttatacccgcacgatcgaagaaagtctgacgacaaatgcacaagagacaaccggctggcgagggattgttttacccttcgatgtttcgacaatccaagctcgaaataaagcgggagaacaaatagaactcagtgcttataatgcagaaggtgaatacgatacttccaagaatccgttttggctcagagaacttacaaccgaaggttttgcagccacgcaaacattctctgccaatactccgtatatcatttgtttcccgaattcttccgagttagacgaacacatcaacatcatcggagacgttacattcagtgcttctaatgccgagattacaacaactccggcatttaatgccgtcgaaggaaaagatttcgacatgatagcaactttgcaaaccgtatcggctaccgagggaatatatgcaatcaataataccggaagttcatttgttaacaacagccgcaatatcgctccttttgaatgttatgttatatgtaaacaagggagtacggatgctcccgattccttcgatttaccggccaaactgcctactgcaatcgacaacgaaaccgtaaccggttcaaaaatctacaccgccgacgggaatctggttatcatctcgaatgaacccaccgaaatagcagtgtacaacataaccggacaaatggttctcatgcaaaaagtagaagccggaaaaaccattgttaacgacattcctcacggagtttatatcgtaaacggtcaaaagatcattttataatcaattctccaatttagatttttgttttcacagcgaattgctcggagccacatggctctgagcaatttttttgtattgagattctgtacttcacttcctatttgtttatatcatttcttttacccccttcgtcactacataacacctcccctatttgaggcagagtatttccacttctcctatgtgttgtataatgatatatttttcttcccaaccgcgggaaggacaaacgactcagtagaaatttagtgggaatagacctgaattttaatgaatgaaatggattgtatttctccttctctcccccgcttcgattcttcatcgaagatagaggattggaaagattccataaattttttgactgtaaggattaatccttttactccgagaggacttccccaaacaccccgtaataatgctacggagcaagacaggagaaaagagctgtgggactcaccatgttcaaacaaaacctcgccctatttcttccgccggcaagtgccctctcgaccctattaaaagcgtttttccttagcgggtgtaccttactttaccttttcttactccctctcctccaacctatatgaacttcactatattgctccgcgacacagcagaggagactttaatcctctcgcctgcgacacaaaaaaagagggagcagcatacagccgcccccacttcataaacacactatctattccacctattagaatacagcaacttttgtacgattaacaatataaatacctttgggtacttctaccgtatgacgaccgctcgacaacatttgcgaggaaacgattcttccatctacactatacacagtcacctgcatatctttttgcaaatctacattgatacaaccattggctccgtaaactttcacatcatcggttaccacctccgaaacagcaccagtcgaagagctggggatcaagaccaaattgtcatacaaatacgataagtcggacttcatcaaacgaagatacatggttctgacagatttagcctcatcggtaatcatagccggatcaattttcaattctacgtccaaccactcgcccggagtataatcgccgataccagtgccttcttgtccggtacttgcatcaaccgtataaccaaacttgatgtgtgagccaccatcggtacgaacacccatctcaataggacaccactcgaagccactttccaaaaagcagacttgcaacttgattccagaataatcattccacgttttaccagcaggaagagcctctgtaaacgtaacgggagaacattcgcctccattcacctttaaagccttcgatgacgtattgataccggtcgtgtaaggattctcggccacttcgcaagaccccgaccacggcattccacaacgaggagtcgtacctaaatccatagtctcgaaagtaaagatagtattgggatcggcaacttgttctttctcgattaaacgaatattatcaatggcataattgaacgcttgacgccccaccttaatcaacaaacttgtactagcatgattaccgtccaaataagtagccaaaattgtttcatcaaaattgaaatcgagcgacatccaagtattatacgtagcgtctccccatgaattctgagctacttgaaaagttttctcttgggtatcattatcaaccaatcctaattcattaccaacccatgtgatattttccgacccttccaacacagcaagttgtaaacgaacacctgtataatcggccaatgtctttccttccggcaagttcaatggaatagccacattggcaaattcggtactgactactttcaacacttttgtcgacgagttatcgctcgacgaacaaggattgtctattaactcggctgtaccgccccatgcagcattcgcaccattcaacccagactcaaaatcatttaccatataggtttgagcctgcatacctactgctatacaagcagcacacaaaagagataatgtttttttcatgttatctactatttaagttaaacatttttatatccatagaattacagttctatttcataggtaaaattaaaataaacattcgacgtaacagaattataaaagagaaaagtgtagtactcttttatctaagactaatactatattatcatttttaacaattatatttattacaagataacaagctgttaattaacgacaatttttatatgttccaccatataaaatcccggtaaaagagttaaataaacaggcgaatttggcaataccaatactttatgtaccaatactcccgatagattccacacacttacttcacaaggcttttcactcttcaatgtaatctccctacccatacaggagactttcaatccgcttcccgatatatccgcacgttcttcgattccagattcatttccggcagtaaccgtatatttttccaaaacagacatctgcggacgatccacggtataattattagaaggctgtacagctaatttataatcaccccaacgaggacctgccgaccaataggttcccggcacaccgttatcccgcaaatagatcaacagattttccagtgtctccaaccaacgaggatcatcgtcgggaactccatattcacccaacaaccctcgcttattatatcgcttcaaccactccacgaaatactttgcacgctcaacacccgtattagctgtaacaccatcggcatcataagaatttaaatattgaccggaataatccttatcaaaataaagatgtgcctgaaatatgagattatccgacggatctaccaatgtcctaagattatcgctatactcgacccaaaaacgtgcagaactgaatgaatcgccgcatacgataataggagtttccgtatctacttctcgaatagcatcgataactacctgagctatattcacccagggagccgaaggatgcatagaataaggctcgttcataatatcgtatccccaaatattattataatccttgaactcctgcgccaattttctccacacatcggccaaatgttcggcagtaaggttggacgactcccctattaacgtataggttttcccaccatcgaacgaataacgagcaaagttatgtagatcgagaattacaggcatacctctatcctcggcagcctgaacaaaagttttcattttagacaactccgttgcatccaaaggtccgttcattacacgttggatacgttcccaacgaaatggaaaacggataaggttcaatcccttccccttaaaataatcgaggtccttatacgttggatacccataatgagtaccatctaccccgggataaataccgccgaactctgcccccgataaattcactccaaaataattttgagttccgtcccctacatactctgccttttcaatcagctcgatattgtctataatatagataaatttctgacgccctactttcatcaataagctcaactcatctgtatgttcaccggcaagccaagccgaaagaatcgtttcgtccaaccagaattcaagcgttatccatgtatttaactcaccggtttgccaagaagccgaacccggccagcatttatttcccacattatcttgtacacccaaatcacaccctacccaatgtatattctcgccacacgcatcgataacagccaattgtaaccgcacacccatatagtccgtcaaaaccttaccattaggcaaggtaaacggaatcgaagtcgctgcaaattcactgctacttaccttcaaaaccttcgacgaagaattatttacatctttcaaaggattatcaatccattcgcaaaccccgccccatgcatcaccggctccaccgagccccgattcaaaatcattgactaaaaacttatcattagcacttgcaatcaatacgaaaaataagaatacagatgatagcaattttctcatggtatattcctttctactaaaatttttacaaaggaagtttttgattcaggcaaatactacatcttttttatcctatactgacactttaaccaatcgaccctcaaataataaagaaggtgcaccgctaagcggcacaccttctttgtcttttttattattcttattattccagacaaacagcagtctctatcggatatgaagttttatctttcaacccgctcaaaaaagacaaaaaatcttttatacgagcaatcatattgtttacccccaacgagctacgcccgacctgtactacaccagacattctatgtgttgcatcgacaagaggctgtatctcttccggcgataaacactgggatatctcgatataaatatttttatcatactcacaagccttcaaaaagaacttgtcttgttcctctttcgatacagcgataagtacaatatccaaatctctccggtctagcattttgcaataatcattatataacaaaggagccttatcttgaatcgatgtaatttctctttccgtgctctctgccaaagtagtcttttcgtcgaatacggccacgcatctagcttcaccggtcgatataaaagtcttcaaaacatttacaccgatggaatcgcaacccactaacccgatattgtaaatcgccataggagaaatatcatctataccttgcgcccgaagcgaaacattacccgttaaaagcaaaagcaaacaacagaaacttttataccccataataccgtaaaaatttatctgatcaaatcataaacggcttgaagaatatctcgacgagatttcccttcaaatttttctatcgttatacctgacatcgtactccaagacttagccgtatccctatccataggtctgtccaaatcggcaacccaatcggttatataccctcgaagtcccatatattgaaccatctcgaaatctggactatcgacggttatatccttaaaatacattaaggtagttttttcttttagcaactccgcttgaatatcctctatatcgagctctttcaccgatttattctgctcaatcgcaagagcggcagctatacccgcagcctgtcccaatgccatccaacaaggctccatacgcaaagtagaaaagcctacatgagtagcagaagcaggtactggaatcaacaaattattgactttttttggcagaatcacgccaaaaggaaccgtatagaccgacgcttgatagttaaagaatccgtccaaagcaatcttacctttctcccgtttatgaacagcatgtgaatcaagagcataatgactagcagtaatgctattgctatacaaagggggacgtttccctttcgccacgggataagcatcattcgctgtaaaaaaatgttctccatgtaaacgacgcccctctctcacataaacttgtctcgggaaattgccattatcgatatactcgtcttttgccagtccccattctctaacattatctcgaaaagctttcggaagtgcttcatcattttgggcaaaccacaataatcctaacgtatactctttcaatctttgagcaaatctatctcgccattgccaattttcttcgggccattgccaattttcttcgggtaaatctgtcgagattagagctaaatgctggttatttgcatccgtttttccgttaggtaaatcaaccatattcgtaattttcgctattccccaaggatcgcccggtatttgtgtagttcctccattttcgatatgtcttcggttagctacctgcatctcaggagtaacactcaacatctctactccggcaaatgtacctgtataaacgtcctctaccaaagaaaggtattccttacgattatatctcttcggcttctctggcaaaatacgattagatggatcattcgtcaaacaaaggcgataattatatgcctgaatatttccatcgccttcattagtcgttccttctaattcagggcccaaccacaatttataaagacgccctgctcctatttcattatattcgtccttaccttcgcgacctatcgaatacggaactcctgccgctgctcctaaatcaccttcataagtcgcatctataaacactttaccactatactgttcccatttcttggtatccctgttgtatattctgacacattgaatctcagcaccgtccatcacaacattcttcgtttcggaatcgaattggcgcatggtcaaaacagtaatattctttctctctggttcaagcatcttttcaaaaactaaagccgctacatgaggctcaaaatgatacccatcgctacaaaccttcacctgttcggagtctttcccgtatttttctatataataatccagtacataattaacaaactctcggaacaaaccggtagtagctccccgcgtcgcaatatcggtagcccccaatccattagcgggaagccctccaatatgtgccgaacgttctaaaaccaccacttttttcccttctctcgatgctgcgatagcagacataattccccccggagttccacctaccacgaccacatcgtaataattgttttgggcaaacaagataatcggaaagaatataaacaaaattttcaacagtacctttttcatttcaatattgctctttgggttcatacaagtttttcaaatcgtccatatcgaatccactcacagtcaaaacagacatggataacggtaaatgtgccataccatcaatgatgggtatctctatggtacgaccaaatatatcaaccccagtcaatgacttcgtatactttaccgggataagttcctctttttcatcagcctctctccaaatactcagtacaggggctccgctctctttttcattctcgtaaataaaaccataagttttacgatcttttgctaagtactttcctatcggtttcaaatatcgatagttattaaccatattggcgaatgctaccgctgccggcttaacagtcaacatagtattatatcgaagtataccgaatcccgactctggatgatgaacgccgaaaggctcttccaccaattcataccaaaacatttttcctgccccaaaataaagctgtaccaaataattacgtaccaaatactgagcctgttgatattccgttacaggtgggaaatgacgacgtatactatcgggaagataagttgtccacccggtttcggttacccaaatctcggtcgggatattccgttttttaagcatctctttctgtattttataaaagccatcatagaatggagatgtttcgggatatttcctccacaatatatatgggtgtatcgctgtaaaatcgatatgattggcgacatcttcccgattgtcgtcgaaatattcgatccactcttcctctccgggccaaatcaattttatatctccgtttaccgctttaatagaatcatgcatctgtttcaccagatcggtaaaagggacaccccaaccctgcggacgccatttctgtccttgcggatggggccatcgtttattccaccctgcaaaattactaggctcgttttgcgactcataaacaagaatacgattctcattcatctcgacatattttttgatattcgtcacatcttcgtcccaacgccagataccattttcatctcgccagccatgattggcatccacatagtctaaaataggcaaccaacaaatattgtgtcggtctaaataatcgataaaaggatcgggcgtatttctcgcagtaccgataaaatctttccatctcgcaacatctctgacccaagcaatgcccaatgcttgctgaatctcggccacccgccagtctccataacgagcataatgagctcctactccaaacggagaatcgtaatctttcttcgtaagggtcacatcgggtatcacgccaaaaccttcctgtttcgagaatatgactttatctccgtgtaaaaaacttacgctcaaataataatagcccaattccgagaactggaacggaacgtaataataccgttcgaaaggactcgacagcgtgtacgttttcttataaccaatcggttttttatcgatatccactatctcgaccacaacctcataggtaatatcgttatttgcttttataaccttacaaactgcattcccagactcgtttttatgataaacagcacctaacttattaaatgtaatatctataacattctcctgagatttcccgaaaactactgtcacagctaaaaaaaacatcgtgacaaatccaattattcttctcatacggcaacattattatattacttcaacactcttttcaccggttcatcggtcattgtaaataccaaatgacctccactcattatatcctcatgcttgatcgtcaaccctctcaccggctttccattcaattcgaccgatttgacatatttattctttctggaaagattcttcgcctctacgacaaatgctctgtcttccgtcaactgaatggatattttatccatttgtggagcacctaaaacatactctccactaatcggatctaccggataaaatcccatcgaagaaaaaatataccatgcagacatctgtccacaatcgtcgtttccacacaaaccaccgggtttcggtttatagaatcgttcgaatatctctggtatcaactcttgggttttccacggttgatccacgtaattatacaaataaacgacatgatgactcggctcattcccatgtgcatactgcccgataaatccactgacgtccgagacaaagcctgtattctcggctatcgtatccaacataaacaacgagtccaatttcatagcaaaagattcctttccacccattaaatcaattaaacccgccacatcgtgttgcacatgccaagtatattgccatgcgttaccttcggtataatccccaccgcagctggctgcatgagacaacaaaaacggattaaacggaaaacgccattttcctttcgagtcctttcctctcatcaacttcgtgccgggatcaaataacgatttatatgcactggcccgtttcataaaaaactcataatccttatccttacccattgcttttgccatttgcgcagcacaataatcatcgtaggcggattctaatgtccgggataccgattctaccgtagttatatcaaatggataataaccatatttatcataagtttcccaatccgattttttatgactcaccgtcaacgaagccttaatcgcattataggcatcttctggactaaatcctttaaccccttttaaataggcatcgacaacgacaggaaccgcatgattggctatcatgcaatatgtctctttatcccataacgtccaaaccggcaaatgcccttgtaccttctgataatccaacaaactatttatcattccgggtactcgtttggggatcaaaatcgtataaagagggtgtgcagcccgataggtatcccacaaagaaaacgtcgaataatatgtgcctgatttagaaacgaacacactgtcattaacacctctatactttccatctatatcggcaatatcgttaggctgaatatacagatgatataacgatgtataaaaatttgttttttgctctttcgttcctgacacagaaactttcgacaacaattccctccataaatcctgactctcttttttaaccgcttcgaaatcccaatcgggactctcagttaacaaagcactttgagccccctcgataccaactgttgaaagagcgacttttatctgtaccgattctcccggttctaaatcaaactctaaaatcattcgtttggctttctccccttcacgagctggcaatacctccttcacggtatagggcttatcgaactttaccacataaaagaaatggcgtcgtacccaatttttaacttcttgatgtccggttatagtccaattatcaggcatattcatgtcggcatacaaaacatgtgttttcaaatggtcctgattatacacgactccactttgcatatccaacaacattcgtgcgggcgcatcagaattataagtacatacataataagcggtacgctgtgtcgctgtcacctcgacatctatatccgaatcggtcaatttcaccttataatatgcgggtgatgccgtttgagtcgctttatcatatgcacttttatatatgccatttttcacatctccgctaaaagggaatatcaatacatctcccaaatcgggacaaccggttccattcaaatgattttgggcaaatcccatgatagaatcgtctgcaatattaaatcccgaacagtatttccactcatcgttccctgtttctggacttgcttgtataaacccaaatggcacacatgctccgggaaaagtatgtccattatcggcatttcctataaacggattaacaaaggaaagcacgtcttcatttccatcagatgaagaaatattattacatgcagtaaccaacaaaactcctgataatatccacaataaatttctcataatataagatatctaaaaaattagcaattcaacccgacaagattaagactttatcactttctgcttttttatacagttgcccgactcatcgagaacactcagtatataagcacccgcaggcaagttatccatatcaacagtgtaaactttgtcatatactctgcccgtatagacacaattgcccatcatatcgaacaaggaaacttttcctatttccgtatcggaataaatcgttaaattcctaattacaggattcgggaatgcacgaatctggaaatcatcgtttttcatatcctccacagaagattctggatgttcccctatttcaataatataaggatgattagagatatccaactctattgaattcacattgttcaataccatttcgggagcagtccccttagtcggattataaacccatacctcgtcataagtttgatcaaaaccgacagttatccgatcgctaccaccttcatacttctctccccagatgaccaattcaaaggtcccgttattcttttggagcaataaatcatgaacagttatcgtgcggcctgtaatagaataagttaattcacccggttcgtcaatatctttatcatcttttagaatagtcgttaaattatgaagataatgagccgattgtctcggattataaaacttatcgtaaaaaccgaaactttggtttcccgattcatctcgtcggtcggtcagcaaatacatggccgtgtaatcaaatccctgagcgaattgtgcaagataaagcgacatatataataatccctgcatctcttccgtcacagcatcgcttatcgtagacccagtttcagtcgtgacacgaggtaacgcctctaactcctcatcggtcaaataccctttgtatttatttaaccacgtcacaccgaaatgccgatacagcacatcgcaacccggtggcacattcgtactcggctcagcggctctccatgtctgattattttgtggaaacttgaaactcggatgattaaaatagttgtgtaaattagcgacatcggcaaaagttactcctctgaattcctcgggaactgccatatcgtcctctggaactttgagatactgtaacccgacattttctcccgaagctccaccatacgtaaggctccaaaccggataattatacccgtctttccccaacacgggatcggctttcacatcttcatacaacttcttctgcatacgagccaccggcttccaattattttttccttctttattccctccgccgacttctccttcaaaaattacataccaatttctattattaggctcgttgttcccttcgatcgcaataattgcgtccggagaagtcgcatcgataattcgcttgacattatttattaaattgggaatattccgttcctgtcccccggctcccagtcctgcactgaaccgaataccggcattatcatacaattgtttatacgaagctatcgacgtgccggctcccggtaacgaagtctccggcagattagtaagcgagctcacactgccccccacactcgtacgaatccaccgagcacccaaatatcgcataatctcctcggtggtattcacattttcacccctactgtttatcgatgtattcatgccaatggaattgagaaaccgattggccggcacagctttgaacgttccacttatatcttcaaccacctcgtaaggacacggtgacaaactattaaaatcaatcaggctggtcgaccgccccaactgtaccgtggcttcttcgtccaatataccagccatttcataatatttgattttacaaaatccgataacattgtcatcagagggctcttctggtatcgcaccgttatctaaaatagaaacattaccccctaaatgttttaaagaaccaaaaccgttcaatcgctgcaaagaccgattattcgtcagcaccaaatctcctccgatataagtcaaaggcatgttctctgtattatccccattggtgaaataataaagacgactacacccatcgaccacaaaatcaccttctactttttccaaataagggaatatcttttgtggtttattcattgcagtggttatattggtcaacttcaaatcgccctgtacctcacgtatcttcgaaaaagatttatcaagatgtgccgtagccgcacccgtcatgacttggggacaattttctataataaaatcgccatgaataaccgagaacttatcttcatcggcaaatgcatccatatcgctcaatacagggcaatccctaaacacaaaaccggcttcactacaatcgatcacatctatcaaccctgttgtagtagtcaattgagaaagaccttccatcgtcaacgttcccgtaattttctttactctatcggtcaatttcaaaatctctgactctggaatcatctcgcttccctccggttcaatcaaagtcaaattctcaacagtctcttccaccgaaccggccgtaaactcctttaactccgaaagcccattcaacgtgtaactgttttgggcggcaacaaatccgcacattacatacggaataaccaacaccctaaaaatactactacatatctttttcatcgtataaaaattaaattatctgtttaattacttttcacagaaaccgtattggttaccgtaaccgtctcgcctgtaatcccccttaccgtcaatgttacattataatcgccaacagctccatattgatgtttcggattaatttcatgcgaaatcgccgacccatctccaaaatcccaagaaaaaggctcctcgcccgaaaagaaatcccaataaagagaagaattagtaaatacgaacgtatcgaatgagctaccgtcgagttgtgtagtaaatgtagctactggtatcgttattttcgtatcaatcaatataatgcctgtattcagctgtttattcacacgattattctcatcagaaatcacaatacccatagcatactttttaggagcatcttttctcaaaaaatctaatgccacggagacatcaaaagtcgtttcgtttttcccatcgggtatttggatattttgtggtatttgaaggacatattcagaaggcacaacttccacatcggtcaaaacaccattatctatcaaggtttgaaccgtatccgcattcaacattaccgaaacatttacagagcctttaatagtttttcccgtacccgaacgataaatacccaacggaatgacaaaggcattatcggcgttcctcactgtatatttcatcggttgtcccggcgtaggagaaacccacgccgtcgatgctccttcttcaatcgtatagacaccgtcaggtgaaatactcccattaacagctatcggtaaataaaccaaagattcgggataaggaatatctacaatttcatcgtattgacatgatgtacccgcaaacaaaaagcaaattgcagtcacaagtaaaagacgattttttatcattgatttcatcttatttcgtgtttattagttattatctctttaccaaagtggattctgtacccaaccggtcgtattaagatcggcctgaggaatcgaatataaatacattttcggctcgaatgttcttttttccacctcaatggggttatattcgaactcttcatctgaaattttcgttatttccacgccccgaagcggtgcgcccaatgtctctggcgcaatcatccaacgacgcacatcccaaaaacgatgatcctcgaaagccaattccacccgacgttcgttccgaatcttttctctcaactcctctttcgatatagccgtaggtacagccggcatttcaacaccgactcgattcctcacttgattcaaagccctgacggcatttaaccggtaaccaacattacccgtaggcccataagcctcattcatggcttctgcataactcaataagatttcggcgtatctcattattacccaatgatgcacactcgtacggttctgcaacaaatctaaattaggatctatgaatttataaatataatagccggtacgcgtggcatgaataacaccctttccatctcgaccgccggtccatgcttcgatcgtacgatccttgaattccacgttattcgtcaaaatcgacatcgctaaccgagggtctctattggcataaggattggacttatgttctggattattccaatcaaacggagtaccgtcaatcatctcataagcatccaccaaattctgtgaaggcgtattcccgctctgtcccaaattatatccaaccggataattattcttttcaaaagtattggtcgaaccgtatcgtctgtcgaatattatctcaccattctgataatcccgtattaaacgatactcgtccatcggatatttatttcccaaagtcgtaataaaatcgttacaagccgcagcggcctcctcccaacgttcttgctggctcttcccgtcttgcatggaaatatattctttatgagtataaccgggagcccactcctctggcttattaaacaaatcgctagccgcataaagtagagctctacacttcaaccccatagcagctcctttcgttgcacgacccaaattattggcaacgtcggtcattctatcgggagcctgtaaaactgccgcagccgagtcgcactcactgacaataaaccttatacaagcagataaggaatctctcgaaaaagtcgacaaatcggatttcaaacccagcggttccgttataataggaacaccgccataccgcttcaccaattcgaaataatagtaagctctcaaaaaacgagcctcatatttccatcgatgaatattattcaatcgattctgataatcttgctgttttgtagggtcatatttcaaataatccaaatcgacctcgtcagattctttcaaaaataaattcgcagcaaatattccttcaaagttacgttcccacgccgatccgtctggattattattggcattccagctacctacgttaaaaccatgaatagaagctgtttccaaagtatattcagcctcgtcgctcgcagctgccatcattgccccgtccagataagaaagaccatctggcaaataagaataaagacctatcgatcgagccaatgtattattatacgaaacattagcaaactcttctgttaaattagtctccgccttaggatcgaggagatcgtcacacgaatagaaaactaccgaaaacaatagcccgacaataaccggaatcttatatggtttcataatacttaattttaatattaaagttgaacactaagtcctaaactcaccgttctcattgccggataaccggtcatagtctccgggtcggtaaatccggccatatggtctaacgagaacaagttagtcccattcatgaaaactcttactccttcaatttttatctttcgagtcaaattcttcggaattgtataccctatctccaaagaacgaagtttcaaaaaatcaccgttcttctgccaaaaagaagaagactgataattgttcagattattggaggccgaaagccgaggataagtagctgtcgattttgtatcctctgtccacctattcagtgcaatagaagaaatctgtccatcattctggaaggcttcgaaatatgagccgctccaataaaccgaccgattcaaagctccttgaaataaaacatcgaaatcaaaacccttatatgtcaatcccgcatgcaaacccaaagtacactcagggacatcggtataacctatggctttaaaatcttccgaatcgattcttttatcgttatttaaatcggcatacttcaaatcgcccggttgaaccgctgcaaaagtctgcttcggcgaactatctatttcgttttggtcgttaaagaaccccagtgcttctaacaaaaacggttgatcaaccctatgcccgattctatactgataagcataattttgaggagcctcggcattatacaatattttatttcttgcaaaccaagcacttgcctccacaaaccacgtcaaatctttggtttcttttccggtataacgcaccacagcctcgaatccttggttactcacccgcccaatattcagttcaggacgcttgaatcctacaaaactaggaagtacatcatacggcatcgtcaaaatatcatatcgcttttctttgaaataatcagccgtaatgcttaatctatcggaaagaacggcatcgataccgatattaaattttctgtctttttcccatgtagcatctggattggcataataattctgaacgtaataatacgatgcagcattcgactgaccgagataatagtttccacctgtataatactgattatacgggaatcttgtagatccgttatctttattccctgtgagtccatacgaagccctcaatttaaggtaatctactattttgttaccttttaggaactcttcattagaaatcacataccccaacgatccggccggaaaaaatccaaaacgttttccgcgtgcataattatcgttgcccgagtaagcaaaggaaaactctgcaacgtaccgcttatcgtaagaataagtcaagcgaccacccgaaacgatatccttatacggtaaatcggtagatgatacgttatattcctcataaccacccatcaacatagcatccacatgatgctctccgaaaaccctatcatagttcacaaaaccatgaacgacaaaattccgccattgattatacgcactttcgcttatagacatagaagaggtttcaccaaactgttgtccggacatatcatatcgggcataatccctagatgctatggtatacgatttatatatcgtattgaaaccgaccgctcccgaaatactcaaccccggggtaatcatacccaaatcgcctattaacttagcggacaattgtgcagatcgcttattcgtagaataatatcctgtttctgtaatctctgcccacggattataataggcagaattacctcctatttggccattttcatgataaatcggaaacgcattgggcggaagttttgccattaaattgaatacattcgtactatattcaccgcttacgtcattccttactcgcccaggattcacacgatcctctacacttccccccaaagtaaattccgaagagatgcgtttcgacaatttcacatcgacattcgtcctgaaattatatcgcgtatacgaaaagtccttcgtataatccgactctttttctgtacccttatataatcccttattcgtcgcgacattcaacaaaacgaagtatcgtacgacatcggaaccacctcttgccgacaaatcatagtcggcaatcggcgaaagagttcgaagcagttgattataccaatttacattcggatacctatatttatccgttccattcttataagcctccaaatcggcaggagaatacacctcagagcccggacctaaatcgttaaccatagcttcgttgtataactgggcatagtcatacgatcctaaaaaatccggtaacctcatggcctgctgcataccgaagcgaatgcccagtttcagttccaaaggtgcattcacacctctctttgtctttacaagcaatacaccattggcagccttattcccatatatcgccgcagaggcagcatcctttaacaaattaaccgactctatttcctgaggcgtcaactgttgaaataattccaacgtagaagggaaaccgtcaattataatagtaacgtcccgccctgttccaaacgtgcttataccgcgagcatgcaacgtaggggcatcgttcccgggctctccactctgttgacccactgtaagtcccggaagtctcgcatataaagtatttgcaacattcgtggtaaacgacttcgacatttcatctccctttacagaagatatcgcacctgtcatttcccattctgcccgctctccataagcaatcggaaccattttttcagaaaacgtcgaatcggtatgaaccacctgagcagataaaagcccagtaaacaacaaaccttgaaccagcaaaaatattttatgcttcatgaggcaatctttctttatcttcatgttgatcatagtacatctgaattaataacctggattctgtatcaaatatcccttattaacctcgttcgtagaaaacgggtgcaaatacatttttttcgtaaatgtacggttctcatacaaatagggcgtatagcggaactcttgcggactcgaattaatccaataaatcttaatgccatacatagctccactcatcactccttcttgctcggcaatcatccaacgacgcacatcccaaaaacgatggttatcgaacgctaattcaatagctcgttcattacgaaccaattccctaaaatcggaatagattccactacccgacaaaatagccggttgtcccgaacgctcgcgaataatatttatagcctctcttgccgaatatttataaccatgtttatcgtccggtccataagcctcattcatagcctcggcaaaattcaaataaatttcattcaattggaaaagtgtagaattgggaacaggctcttggttatcgggacgcatgatagacggagagactaacttatgcaaccaaaatccaccataacaatcattgatatgcttaccggccgcaacgcccagttcttcattggcttcccaaagctgaacctcgggcgtctgtgaattccaccaagataaattatatgcgatagtctgtgcaaaacgtctatccaaacttgccaacttcgcttgtaaatcatcgccgccgttccattcgactttattaccgtcacgatcttcgtacttacgcacaaagttcaacaaaggtgtcgtcccgtttgtacccgaactaccggcaataatcgagcccggaataatacccgaccacggacgattccaacaacccataccctgagcggccttctcggctaaaataatctcgggattatcatacacctcccaactatattgataattggcatccactccctgatcggtaatcaaataacaaccattcgtttccgcccagcgaatgcaagaatcggcaactgcggcagcacgctcccaccacaccatatttttaggttcgttcaaacaaatgagattattattcgtcccgaaatccatataaggctcgttggtattaaacaatggactagcagcatacagcaatactttagactttaacgccaacgctactcccttatgaacacgccccctcagattctgcaaagcattatcgagcaaagccggataagcctcgtcaatatcctgcaagatgaaaaaaagcatctcccttaaactggcacgaggtattttcaaattatcgtccaactgcaagcgttcccgaataataggcatcccgccataacgcttcatcatctcaaaataattcaacgctcttatcaacttagcctcggctatcaactggtctctatattcaggagtaatatcggggacatcataaatcctgtccaaaagaaccgttatcttcctgatagctacaaaacgataatcaaatcgagaatcatcggtacgattagccgagatagaaccctcgttccaccagttcatgcgataccagttggcacacgtctcggcctcgtcgcaagctccggcgaaaatgttctcgtccctattggaataaacattcgagttcgccgaagcataccccaaattagaatggatacccatctgataaatactcgttaagaatgtctccacttgtgttctcgatgaaaatatagtatcttctgtcacatctcctcccggcggtttttccaaatagtttcccatcatatcttcgcacgatacgacagcgaccggcaacaccagaactaataagattagtaagggagaaacaagctgtttaagccttttcaaatttatattcttcaaatacatggtataatattttaggtcgttactatccaattaaaaattaacattgagcccgaagttgaatacccgtgtaacaggataaggttcgctattcgtcactccggcattggcgacttcgggatcctgtccgggtaacatatcggtccatgtcaataaattgcttccatttacatagattctgatcgaaccgatacctgctttcttcaaagattcttgtctgaatgtataaccgacttctacgtttttcaaacggaggtatgaagcatcttccaaccaataagtcgatgttaggtaattatgtcctactccattcacaccatagcgaggataaacgattttctggttattgacaaaacgctcgtaactccaactcttcaacaaatcacgattagctcccgtatattcgtaaaagccccgcataatacgacgagaaggcatattggacacgtgagtcgccccctgaaacagcaatgaaatatcgagatttttataagaccctcctaatgaaattccatacatgatttccggaaaattggaatacccgataggaacttggtcatcgtcattgattttgccgtcaccgttaatatccacataacgaacatctcccggctgtatcttattattattgttagccatcacatactcgggtcgtcctgcggcatttacctcttcccaagagttgaaaattccatcggccacataaccgaagaattgcccgtaacgtaatcctgtccgatagagataatcttcattacggataacttcgtcttgttccaaaatcttattatgggcatacgtaaaattagcttttacaaaatagctccaatcaccaatacgatcgccgacagaaatttctccgtcccaaccagaatttctcatacgacccatattataagccggaagattcgatgccgaaataccgatgatagtaggaaccgtattacggttacaaaggatattatcccgatgctccataaagtaatcgaacgttaaacctatgcgatctccccaaaatttaacatcggccccaacattccatttgattgctttctcccatgtcaaatcagggttaccggccttactctcgttagaccccacatatcccacatatgacgaacccacttctccaaaataatacgaattgctacctgtataggtatataccgatggcaaatataaaaagcggtctccaccgattttatcgttacctacggttccatacgaccctcttattttcaagaatgacaagacttcatttcgagggaaataaggctcctcggtcaaaacccaccccaacgaatacgcaggaaaccacccgaaacgtttgcccggggcaaaattctcagtaccgttatatcctacgtttacttcggccaaataacggttgccgtaattgtacgtaacccgaccgaccaatccttgatatccattaggaatattatactttaatgtaggattataatatttcccttgattgtacaagaccaatcccgttaccgtatgctccccgaacttgccggtatattccgctccgatttccgaataaatgcgtatattcctgctatttgttccttgataagtcaatttcccgggatcggtagacggaacaaaaatcaactcatcgccggctcttcgcaagtcataggttattccacggtcattataggtcttcgtttctgtactataactcttgtaagaaagagctccacgcaaagaaagacctttcaataaataatccattttatacgtgaaccgtcccgataaattcaaattattttcatacttcgatttccaacctctcgtataaggactggcaggattgcgcccgctaccgaatacatcggttatcgtcacaaccttgttgtcaatcactcccggtgcagcattagacggtgtcgaattcaacgactccataatttgtcctgtactccaattggggttctgcaaatttcccatctggttagaaatatctaaactcaacaacaggtttttcgtaacatttatatcgaaattcgaacgcatattatagcgtctgaatgcaatttgatagctataccccgggtcatatataccggtatccaacataccgttctgcgtaaacacacccaatgaaacgaaatatttcacccgctcggttcccccgctcacattaaagtttgtctgagtctgagtcgagaaatccttcaacatataatcataccaattgatatctggataaaacagaggatcagaaccggttcgatatgcttcgatagcttcctcagagtaacgtggaatatacgataactgagaataataatcgtaagcctgagcctcattataagcccttgcatattcatacgaattcatcggttcgggcaaaaacgggaaattcgtgatagcgacatttgtcgaaaaactaattttcggttttcccaactcaccacgctttgtcgtaatcaaaataacaccattcgcacctctcacaccatatacggcagtcgccgaagcatctttcaaaatagacaacgactccacttcgttcgggtctatatcgttcaagttattcacttcgataccatctaccattatcaaaggattctgtgattccgcatcactggcgaaagtaccgacaccgcgtatacgcaacgtagacatgtcttgccccggttcaccgcttcgttgcacactcaacaatccgggaatcctaccgccgagtgcattgctaatattagcttgcggcgattgtaaaagatcctttgtggttaccatagagatagaaccggtaaccgtttcttttttctgtgaactataaccgacaacaacgatgtcgtccaacgtattggcaacctcctccaaaacaaattggaaccgggtttgtgaaccgacctttacctgctgaggattatatcctatataagaggcttccaatacatctccgggggaaacttccagcttaaatgccccgtttatatcggccatagaaccaatcgtcgtccccaatacccgaacactggcgccaatcaacggttcgttattggcatcgaaaacggttcccgtaatctgtatcttatttgactttacagcctgagccttacttttcggtgacgatttctctaccagaaataaactcacttgacgtttattctttatttcataagaaatattcgttgtactgaaaatctggttcaagacagtaacaaccggcgtattattgactgtaacattcacccttttagacaattcggagttcaaattatccgtatagaaaaaaacataataattggtcgacttctcaatttgagacaaaacacttttaataggaacatttctcaaattgagagatacattggtttgctggccccatgcatacgggaacatacccagcaaaaaaagtaatagaatcgaacgtttcaatttattacagaaatgccctctcccatacattccaaatagatttttccaaggtaacataagtttttctgtattagtagttaacaagttttataattaacttctcttcttcaataaaatagtatttccgttcatttcatacgacatgggaaccgttttagaatcggccttttccaatgaaatcgtacgggaaatagtttccaatacgtctttcggatcatcgaacaaaaccaactttccactgcatttcaaatctttaatatccttttcgcaatcgatataaaggtcataatgtctggaaattttcgccaatatcatcgacaacggctggctgcggaattgaagcaatccatctttccaactgataaaatcatacgtattcgccgcagtaatatccatagagttgctcgccaaagtcagcatatggtcaggttgcaaaattttctttttcgattcatcattcgattgaacctcgaccaatccttcaaccaagacaacagactgagccaactcatcgtgataagccatcacattaaatcgagtacccaatgccctcacactcatttccgaagtttttacaaaaaacggcctttcggcatctttggcaatctcgatgtaaatttcgccatcgacatatacttctcgtttattcttctcaaaagttgtcggaaaacgaaacgtcgagcccgaattgacccaaaccttcgaaccgtcttccaataccaaatgagaagctctgcgacccttaggcacgatcaattcattatattcgaccttactatcgtttacatctactgcatatcgttcgtcctgctggtttatcgacgaaatagtcgcctcgccgcctccatacaacacatcgtccccctcttcaagaggaatcgtcctttccccggcaatgaccaatcgggtatctttctcaaaattagatcggttcttctctatcgtcgctacttgattatcggaagtaaaaggagcaaaaaaagaataaacacctaccgaaagtaaagcgacgatacatgccgctgcaaaaatcttataaaagcccacatacaaacgatgcctccgtatcgatttcacttgatcgttgacatgctccaaaagttccagcttctcctgttcggaataagtttcatcatcgaatgtcatagacgaaagaagttgtttcgccgcttcaatttcttgttttttctcaggattctctaaaacataattatcccaaaattcaacatcatcgtcggtcaaaagcaaaacacttcttaaaaacgaatcatctttaagaaaatcaagaatattatattctgcccttgttttcatctctatcgtttggatatattttttttcaaatttcttttattatacagacgacaaaatccattttttgtcccctctttttccaattttctttaccataaacagattattataaaaagaaaagccactttcaactttcgcattttaccaattgctctcgacacggcttttcttgaagactgtatggtcatgtgcataagagaggcgatctcttcatactccaactcatgaatgaatcgcagatatataatctcccgttgtctaccggtaagagaactgagtaatttattcaattttccttctatttctttcttatcctcctcggctatcaactcattcaatatattccattttatagtgaatttatattgataatcatctatactacaagtatctaccgatactttcaacatatctaataaattattcttcaaagacctgaataaataatatttcaagttcctcacttcgctaaggctcctccgattaagatatagtttaacaaagacatcttgaatggcatctttcaatacttctttttcaaatcccaaacttctgccatattgcaaaagaagatcgacatacttattataaataaaagtgaatgccgcatcatctccatcgacaaatctttgaaaaacgacctcatccattgtttctgttatttttcgataaatttaaaatctaacactacaaacccaatttcctcgaaaaaaggactgcaccggatagtggtgcagtcactcttccaaaaaactatttatatacaaataccatcttcgagacttcatatctccgggaggcatatatcttctttatcaaataaattcctgtggattgaggtttttctaaccgaaggcccgacaaggtaaaatattgaatttctattacaggctcatcagactcgataaaactcgattctacggaactcggaagcccgtcatattcataagcgcccatatccactgttccattaacaacccgctcttttccggctaaatctttatcataatcgccaatagcctcgttatttcccgcatttatcgccagactcgaagattgaagcatataagttccatcgacaaactgaggttcggcattgagattgcctacaccgccctcggattcaggccatatcgtatatgtaacttccgccgtcgattcgggtcccagaaaaacgttagatccggctggtgtcgattcagaccgagcgacattatcgacaacgatacaattcacaacctccgaactgcctttatttccaaaccctataccaccgccgcggccactcgtcgcatcgtttcctacgaccgtacaatttattacatgagccacaatctcttccccagccggttcggttaccatgctacaatctattccgcctccataattggcattattggccgtcccgccaattttattgccctcgaccaaacagttcacgacatagcccgttttaatcgaaacaccacctccattattacctcctgtcgatgtattgttcgattcgtctgcgacacaatgattatttcgtataatggaattcaataaatacccaccatctaaacagactccgcctccgacacccggtttctttccatcggctgctatggctatattattctcaacgatacaattctttacgattccgcgagcatacacgcctccgcccacacctttaatggagccatcggtttttgatccataattatcgtggacgatacaatattctatcattccatcggggtggtcgatataaacaccaccggcacgacctgcggctcccgcagtagaattataagcatccccacccgatatatcgaaccctacaaagtaagacgccgtcttaaaatacaatacccggcgaccactgcctttcaaaaaagtctcgatattgtccaactgataagaaacaggtttttcactctctgtaccctcacaatttccatacaccttcacatcggctctattacaagtaaaactggccccctctggagctacgtatgttcctttctttacaaagatttcgtctccctccgacaaattggtcgacgtcaatattgcattcaacgaagtagaggtttcccaactcaatccgtcactgtcttcactaccgtctggggtaacaaaatattttacagcatatgcgctttgaaatgaaaatactgtaaaaactaaaaagctaagtagatttgttttcatgatataaagatttaacggtgactgaaaaaggggtattcggcaagcaatagcctgagacgatatcggaattccctaccgaatacacccaaacaaaacatcgaaatatttatttaaccgtgatgaacaccttctcggtaattatttgcttcgtatcgaaggtcttcttaacgatataaagtcctgaaacactgggataagtaacctctacaccctgcaacgtgtaatactgagtacgtaccacttctccctcttgaatttcaacatcatctatggcactaccgtccgttacctcataagcacctaaatcgaccgacgtaccgaatatacgggcattaccagccaaatcggtatcatatccttcgatagcaggatcatcaccggcatcgatacaagggctaccttctgccaaacgataatttcctcctgctacatcgacaaattttggatcggaagtaattgcgctggcactgaccgttttttcaggtacacaaatggctccgatagtcactctttccggtaatttaccatctgtttgagggttaccgaaacgaatattggcattacctgtaccataatcgtcttcacgacatgtattgttccatgcgatacagttggcaacagtagcagtcataccgtcggcatttgtcgtctgaaatccgataccgccacccaatccttgaacatggttcttcgcaacggtacagttaatcacataagcatctttttcagtacaacagacgcctccacctaccgattgattattcagcgacccattcaccgaattcccgacaacaaggctattaattaatttacccgacttgatggcgataccgcctccttgactttggaaagaatccccatcgtcggttggagtcgtactgttattacgaatgatacaattcaatacaatggcattatcgggattacacccatttccctcggttgcatccaagcaaataccgcctccgatacccgtagaccaagttttcgacgtatcttcccacggagcagtagtcgcaatgttgttttcaataatacaattttccaacctaccattcaagacataaaggcctccgccaacaccttttagagctttcccattggaacctaaaatatttttagagccatcgacacctatattatcatgaatattgcaatacttcaaagttgcccctccattattaatatagacaccaccgccacgaccgactcctgtggtctccgtcgatgcatctccaccagatatatccagtccataaatttccgatgcctttccgtccaaataaagtacccgttttcctccgggacccttcaaaaaagtttcgagcccttcggctgtcgtatacgtaggcggttcggtttccgtgccgacacaattcccataaactttggcagcagccctcaacttaaaactacccgtatacgtccccttagcgacaaaaacttcgtcaccggcagcggcccaactaagagcatcttccaaactggcggcactactccacgatgttccatcgcccgaaccggattctgtcacataaataacatcggcattcattgtcgaaaaacctccggccagcaataacgctcccactagtaaaaattttttctccatgtcatttaaatttaagattagtaaatattactattatttgagacgatgggtataaaattttatacccatcattctcaaactattttctaagttttttatttattcaccatactatttcgaaaggctcgaagtcatttgaccgaaataaagtttttttcaacaactactttcttggtatcatacgtcttcttgacaatatagagtcccgatacagacggggaagtcacttcgattccctgcatcgtgtaatactgaacacgaacgatttcaccgccattggtttcggcggtttctatggcactgccgtcattaacttcatacggtcctaaatcaacagctgctccaaaaatacgggcattaccgtccaaatcggtatcatacccttcgatagcgggatcatcgccggcatcgatacaggggctaccctcagctaaacggaaattaccgttcgctgcatcaacaaacataggatcggaggtaattgcactggcacttactgtattctctggaacacataccacattgatggttactcggttgggaagttctccgtcggtttgagcgtttccgaaacgaatattggcattacctgtaccataatcgtcatctcgacaagtgttaccccatgcgatacagtttgatacgacagccctcattccatctgcattttgagactggaatccgaaaccgccacccaatccttttacatgattgtcataggctgtacaattaattatataagcctccttttcggtagtacacacaccaccgccgacattttggttattattcgatccattcaccctattccctacgataagactattaatcaaataccccgacttaatggcaataccacccccttgatgataataagaactttcgtcatcatctggagttgtataattattccgtattatacaattaacgactacggcatctcccggatcgccagaagattccaagcaaacaccaccgccaacacccattgaccatacggaattatcttctttcagccacggatctgtcgtcgcgatgttattctcaacgatacagttttccaaccgaccgttccacacataagcaccaccgccaacacctctctgtggaatacgatttccctccaacaaacgtttagtcccgtcgatagctttattatcgtgtatgcgacaatacttggccacaccgcccccgctattgatataaagtccgccgccacgagctataccggtagtctcttccgaagcgtccccgccagatatatcaaagccataaatcgttgcccctccgtccaaaaggacgacacgtttaccatcgcctttcaaaaaagtttcaagaccttcggccgaagtatatgtaggcggttcggtttcagtcccctcacagttaccatatacggttgctgccactttcaacgcaaagctaccggtataagtaccttttgccacataaatctcatctcctttcgcagcccatgaaagagcatccgccaaaggagcggcactattccacgacataccatcacccacgccgttttcggtcacataaataacttcggcattcattgttgacaaacctccgatcaacatcaatacacccgcaagtaaaaaaagccttttcatgtcactaaaatttaagattaataattatgttgtaaagacgatatattcgcaattttatacccacttctccctattaaagtattactcatttggcaaaaggacttaccaaatcatcttttaacgtgatttccatagcttcttgaaaatgggtcttgaaataatttatataatgacagaaattgtcagggtcatacgaaaccttcaaattcgtttcggaacagaaaccggtaacttcgggcacgacataattaccggcatatttaaattttcgattggcgatagctcgatgcaaagttttcaattgtttaatcattccatcgtttacatcaacaacattcgctttatcaaactcaaccacaatttcgtacgacttattacaatcggcattcgatataggaatcgaaaccatgaactctttaccgcaatatgaccattcactggaattgggcaacaccgtataatttaccttcatgccatttaagctaaccgatcgaggcatttcggctccatacaaccggacgagataatctttcgaatggttcattcctcgataatgaccctccctcggagcaatcttaatccgttgaatacgattttccaattgcgacgttacccgtgttgtagcatactccgcaacatatctctgatcattacctgcatcttcataaatagaaaactcacccgccgcacccgggaaaataccgataatttgtttcttcggattatcgtccaaactattcacctcttttccatacatgggaattacagcaccggctttaacataaataggatattcttcgatagaaaattgtcggataagttcctgtccgccgttcaataacgtgcccgtatgccattcataccagtcgttaccggccggaagccaaaccttcacatcagataccccattctccatcggagccccgattggagctaccaaaatattatccccgaacatgtactggcgagaataagtatatgcccgctcgtcttcgggataatcataatacattgggcggcacagcgaaactcctgtttcataagtctcccttgccatcgtatagatataagggactaattgataacgcaatcttacagcgttatacaatgcgtcgaaatattcgtcgcggtatctccatatctcttttaccaacgatggatccttatttgagtgcgttctcaaaatcgggctcaaagcgccatattgtacccaacggacatacatctcaggatcaaattgataaacattatcgtcttcgatgaacttatgccctcctatatcgtgactccaatatccataaagaacattcgaagccgtattggtaaaatagggctgatattcgagcgtattccacgtaatataagcatctcccgaaaaacctatttgataacgatgatttcccaagcctccccaacggtgataaatcaatggacgcttatcggtattgcgtttcatatcttcaaagaaagtataattgagccaccaagtgttattcagtttctctatatccttatcgaaaacccattgctgccaatcgagccaccaaaaatccacaccttgctgttcaataggatgcaacacgacatcgaacaacgtactcataaacttcttattagagccttgccacggaatattttcatgagtagatatatcgaaattcatacgtttcgcaaaatctttgtattggctttcaaagggagcgatacccgatgccggatgcaaattcaaggtcgttttcagatgcttcgacttggcccagtcaaaaaattgatcgggatcgggaaacaaacgcttctcccatgtataaccggtccaatgtttacgttgtccccatttgtccggtttggcgaataaactatcggtctcatgccaatccatatcgacaaccaacacatctaacggaatattgaatttctcgaattgcgaaaccacatctctcatctcattgtcggaatatgcccaataacgcgaccaccaatacccgaatacgaaacgaggaggcagtggtacttttccggcaaaaagagtaaaatctttgagggcagctttataatccgaaccataagccataaaataccaatcttgtaccgttctgttctcccgctcttttacccacgaaaaatcgctattatcgaacaacaaaccggacgaatcgtcgataagagtccaaccgtcacgagacaaaataccgtcctccaactgtaactcgtgcctcggttcgttcctcttaataaaggtcgtaccgtccatacgatccaatgtgcgggcagtccctttcaaattctgcttttgagtaacactcggattccacgtaaagggtctttttttgttcagatattttatctctaaattttcttttgaaaatttccctgtattcaatttatatgtcagttccaattcgtccgttcgaatcgtcaatttacctccccttataattttcttaaactcagggaccggcaaattccgattaatcacaataaacgaacgctcatcggtgaacctatgcaaagaatcccactccatacggataacacgcggtgtcaaaacggtaaatcgcacatcaccttcctcgactacggctgccggattagcaacagcatcgttacctgaactataagcgactaagggaaataaaatcacgaaaaagaaaaacaaaacattttttttcatggatatcaatttaagctataacagttttttatgagttaagacgataaaaccagaaaaatatacccaactttatatattcaatttatcaatatgattcaaccgaatgacaactgccatttttaataattccttttttatctatctttgtatttacaaaatgaataaccatgaataaatcattattgacactaagtttaatacccatagcctcggtaatgcatacatacggtacaagccatgtacccgataatcgtccgaatatcattttatttttggtagacgatatggggtggcaagatacgtctctccccttttggacccaaagaaccatgtataacgagcgttatgaaacgcctaatatggaaaaattggctcagcagggtatgatgttcactcaggcctatgcttccagtataagttctcccacccgatgcagcttgatgaccgggtgtaatgcctcgcgccatcgagtcacgaattggactctacggaaaaacacgaaaaccgatgccgtcagcaatactctggaagttcccgattggaactacaacggcatagcacaagttcatggaacaaacaatacctttatcgctacttctttcgtgcaattgttaaaagacaacggttaccacacgatccactgcgggaaagcccattggggtgcaatagatactcccggagagagtccctaccatttcggattcgagaccaacattgcaggacatgcggccggtggcccggcaacttacctgagcgagcgcaattatggatacgacgaagcaggcaattctacatcgctgttctccgtcccgggattagaaaaatattggggaacaggcacatttatgacagaagctctcacccaagaagccttaaaagccctcgataaagctaaaaaatacaatcagccgttttacctctacatgtcgcattatgccattcatgttcccatagacaaagatgtccgtttctacgacaaatacaaaaagaaaggattgtcggacaaagaagcggcttatgcttcgctcatcgaaggaatggacaaaagtctaggagatattatggattggctggaaaagaatggtgaagccgacaataccatcgttatattcatgagtgacaatggaggatatgcgacaggaagcggttggagggacgaacctctgtatacccaaaatttcccgttaaaatgtggaaagggctctgcatacgaaggaggaatacgcgaacctatgatcgtccgttggcccggcacggtacaacccggcacacggtgcaacgactatttgattatagaagatttctatccttctattctcgaaatggccggtatcgacgattacgatgttccacaagaaatcgatggtatcagttttgttcctctgctaaaacagaccaaaaatccttcgcagggacgcagcctttattggaattgtccgaatatatggggagaaaaaggaccgggaataggaccgtcctgtaccattcgaaaagacaattggaaaatgatttacttctacgaaaccggagaaaaagaactatacgacataccgaacgatatagaggagaataacaacgtggcagctttatatcctcaaataataaacaagttatccaaagagctcggcaaattcttacgacaaacgaacggacaacgcccctcttttaaaaaaacagggaaaccttgtccctggccggacgaaatttaagacataattacaggactattaacaagggcaatagatagatgtctattgcccttcatgttttctaacggaaatattattctatcttgatttcaaaaggtgtagccggaagtcctaccgaattatataaattggcatcatcgggattatcgccccatgcataccgcaccgacaccgggtctatcacatcgggacatgaaagaacaacccgatctttccctgccaccttagcctgcacccatttatatactccatcatttccggcaacggcgaaactcattaaatatccatatttgttttttacaatcagcccatcagctacattgtcgaattgtacgacaattttgtcttgcacccgacgaacggtcttaggcataggactttcacaaaccacatcggaaaatccataatcattatgaagggcatgcaaagccaatctacgtcctacctcctgtttatttttagggtgaatgtcttttgcttctcctatatcgataattacggcctgaccggtatgagataaagaaagtgtttgcgtttgggcttcacgaacttgcgcccacaaactttccgaagggacttcaactacatccatataattagcaagttgaacccaataaaatggaaagtctttcccccatttttttctccaatcattaatcatagcagggaacaggtggtaatactctttggctcgattggtattattttcgccctgataccatataactccttgcatactcaatcccaccaaaggattaaccatagcattatagagtaatgagggataagcattaggcccatattctacaaaatcgaaatcggaatttgaagccgaaactttatatttccattttccggataaaggaatagtcttatccccgaccttcaaataaatttcattcgccgggccatacaaacctccaccgcctctataatccgatatttttaaagtaatctcattcgattctttcaagacaccggcaggaacactgtataggcgtcgcacgtcgtaaccgacggtctctcctattttttgtccattaatccatgtaatatcatcatcgtcaatcacatgcaaactcaaaaccgcctctttccctacataattctccgacaatgtaaaacgacaggtttgccacaccactccatcgagagagaccagttcttcttcggaccatagtccgggaacactcacttctttccaatcgtctttggaatacgaaggcaaataccacttttcagaaatacccggttcggctttcatcgattcgataaatttagctcgattttcatcgctacggcgaacgtattcctcgaattgcgaagaacgcatacgatcttgcaatcgtttgtacttggggaacttgtcgatagcatccatactcatccagctttcaatatcagttccaccccacgaagtattgataaaaccgataggaacacccaattcccggtataactcacgggcgaagaaataacctactgccgaaaaatcaccagcactccccgaatcacatactctccactcaccctgcaaatcggaaagcggacgatgcgacatctcttgtttcacattaaacgagcgcaaaaaagaataattctcggcgtctgcaatctctttttcggcattcatcgcagcatgtaaacggaactccatattggattgcccgctacatatccaaacttcgcccagcaaaacatcgtcgaaagcgaggcattcttttttccctttcacgattaacgtataagggccaccggcctccataggacgcaaagttgcgtaccatttacccgatgcatcggcacggacactcgtcttctgcccattcagttcgacagtaactttttctttcgggctcgcactcccccataaattgattgcctcgtttcgctgtaaaaccatgtggtcggcaaagatgtgcggcatggaaagttcggccgaaagccttgcagaaaacgttccacataggaaaaccaataccaaaaacgagaaagcctttttcatataaatatcgattaaagattaatgtgttgcagtctctaatttaagtttatgactccccgtaaagaagatcgtatcgccgttatacgtcacattgtctcccaacggggtaaacgttgccgacacacattcgggcaaatcgaactcataaagaatattaccctcgtcgtcccgtttccacgaagtcgaaatgcaaccgtaaggtgtctcatgttcgatttcgagatagtccaaattttcggggaaatacggacgtaatgaaacatgccggaaagccgggttcgattcatcgattctcaaacctcccaacgttttatacaaccatgccccgatctcaccgaacatgatatgattcaacgaattatcgataacgacatcgattcgccaattttcatgtaaggtcgtcgccccgttctttatccaatacccccaagaaggatatgtttcttgtgtagccacccgataggctgtttcgggataaccgttatcagacaaggctccgaggagagctttactacccagcaaccctacatcgatatggcacgaatcctgtacgactctgcggttcaattgctctgccactttctccctatatccatcgggaacaatattccaataaagaggcatagccaactctgtttgagtacccgatgcataaagaccggtctctttgtccaaataacggtcgttgatcgattcttttatcctatcggcaagcgcttcgtaataaaccgcatcatcgacataaccgaagagtttagcagctttcgccataatagatacatcggtataataataaatagaagtagtcaaagtcacatcgcttttacttctcaccgggatccaatcgccaagtccccaatcggtcaagttatctttggaaatagactcgatataagctacatatttcttcgccgaaggatacatacgccgcataagagtctcatcaccataaaaccgataaatttcccacgggataatgatagacgcgcttgtccaatccacgccgttcgcccaatcgaatccccataccgaagtcggtacgatacaaggataaacaccgttttcacgttgctcgtctataaaatcgagtaaccacttctcataaaccgtaatcgcatcgaaattatacaaagccatctctatggcaatgtgtgcatcgcccgtccaaccatttttctcccgttgcggacaatccgtaggataaccgaacaaattatccaaataggaattattggtggccgtccatattttgttcaacaaatcggacgaagaacgaaaccgtcctatctccggcacatcgctgtgcatcttcaatgctacgatactattttcatcgagagctatcggttcggacgaagtcacctctacatattggaaacccttataattgaacttaggagtaaatcgagtctccccgtccctcaatatgacgatatccgtttgaaacgggtcgctgtcgtcggtcggacgataatggtaatcgatattcgctaaattcaccgtaccgtcttcattcagcatctccccatgtttcaatcgtaaaacaatgcccgctttcccctctaccgaaagttccaccgttcccgccatattctcagggaaatgatagacaaaacaagtatcgtttatttttacaaaccgtgaagcgttgtgacggacgatttccttcaccggcacagttaattgagcctctattcgctgggtaggagcagatacttccttagcatttttccattgtgaaacatcgattcccgatgtattccaaccctcgatttcctgccgtgcatcatagtgttccgccgtataaatgctgttgaatatcacaggactgtcggtcgttacccagctgctatcggtcgatatagtttcgatacttccgtcggcatactcgactcgtacttgcataataaatgcagggcggttacgccacgaggctttatcgaaaaaccaaactgccgtggattgatgattataccacccgtttcccaattgtaccccgatgacgttctctccctccgacaaattgggcgttatatcatacataaccgataatacccttttgtcgaaatgagtgtacataggatccaaaaaatggtcccctatgcgtgaaccatttacagaaagttcatataaaccggcagcggcgataaccgcataagcatgttttacgtttctcctcacttcgaaatcctttcggaaataaggagacgggcgataatccttatcatggccatcgctaatccatcgtgcatcgccccattcttggggagacatcatacctgtggtgaacgacgacagcggtgagcaaacaaagcgatcctctcttttcgttttatatccgactttccaataatatttagtccaagattgcagcgaatcgccggcgtaaacgatcctgcggatatcactcggaagctcgccgctatcccaacattggccagagccgtttatcactgccatactatcggcagagacccatacccgacaagactttaccgaatctgtcttcacgaccgggattttccacgacaatctcggcgaagacatatcgattcccaacggttccgacaaatactcacacattaaggaatacggagcctcgggacttgtactgcaagccgccaatatacaacctgataatatgctcaatccgtaactaaataccctgttcatcatcgcttatatctatataattagattttattttgttcggcaatctcacggcgattctccaaatcggaagaaatctcggacaatcgtttttcgctcaaaggatacctcgaaataaaaagtgccgatattccggtcgctatggccgggaatatactcatcatcaaacaaatcccggtcaatgccgattctgattgtatcgtattggcctcgaacccgaaatagaacaacagccaaccggtcaaagagccacccaatgtccaccccaatttctgagacatcgatgacgatgaaaagataaggcccgtagcccgacgtccagttttccattccgagtaatccgatatatcggcatacatcgaccacaacaacggagaaacaataccggcacaaatactaatgatgatttgcaacaccaatattccataaatgccgtctttgggtaagaaatagaataggatactgaatatggtagcccctaccgttgccgtcaaaaaagtatattttttacccatcaaccgtgtaaacgtaggaaccaacataatacccaatatgttagcagcttgtcccaaaacaagataaatggtgatgagcgtaaccgaagcactcataaaggtaaaagagaacgtgtcggaggcctctacataatatttgaaataatagactgccgaaccgtctcgtaaagaattaaacccgataaccatgataccggccaccaaaagaatccaccacggtttgttcgtagccaaatctttcacatcgtctttcaaagatgttttctcttctttgataggctttacccgttcttttgtccacgaaaaagtaaggaaaaacataatagccgccaatatggcaaaaacgacggcagccatttgccaaccgaatgcctgtgacggaacgccgtcgactattttcattttactgaatatatcgaccaacggctctatcaggaacaacaccaaaatactccccccgaatgcaaaagtcattcggtatgaagacaatgatgtacgagtctgcgggtcgggcgacattacccctaacaacgaagcgtatggcacattgacaaacgagtacaccatcatcatgagcgtataagtgacataagcatatacgattttcgatatttcggaatctccaccccatgacgaaaaagtcaatatgccgcataacccgaaaggtatagctccccataacaaataagggcggaattttccgaaacgagagtgcgtacgatcgcctaaaatcccgataaaaggatcgaggaatgtatcccagatacgggtaatcaagaacatggttcccactaccgctgccgagattcccaccacgtcggtatagaaaaataacaaatacatggtgaagagcttccaaaacatggaagaggcggcatcacccagaccataccctattttttcccttaattttacgtgttccatgatatcttatttcaatatttttttattatgatcgaccatagcgataatagtccgtaccgattctatcgaacgcaatccgtcggcaggcgtatgcaagcaataatccaccaaacggtctactgtcgattcggcaacgtgcatacgcgtatcggacgaagcatagtatatgtacactttcccgtcttcatcggcaatccaaccgttggaaaacaaaacattcgaaacatctcctatgcgttcttcatcgaccggggccatgaaatatccggcaggctctgcaatcattttggtcggatcctccaaagaagtcatgtaaagatagagcacatagcgcaatccggcagcacaacaacgaaccccatgagcaagatgcaaccaccctttttcagtcttaatcgggtgaggaccctctccatttttcacttctttaatcgtatgatattcccgtttattgataattacttcgtcgtgtacctctgcatggcaaatatcatcgaccaaagcccagcctatgcctccaccatttcccgtatcgatgaaaccgtcttgcggacgggtataaagagcatatttcccattcacgaactcaggatgcaaaacgacattacgctgctggctgcgagtctttaaatcgggaagacgctcccacgttttcaaatcttttgtccgggcaattccggccgaagcaactgctgccgacaaatctcccggacgtgcattgggatctttgcgttcggcacaaaagataccgtaaatccagccatcttcatgtgcagtaagacgcatgtcatacatattggtatcgggaatatctgtttcgggcatcaaaataggatagtcccaaaaacgaaatccgtccaccgggctatcactctcggccactgcaaagaaagacttacgatcatcgccttccactcgcaccaccaagtaatactttccattcaatttaatagcacccgaattcatcgtcgcattgataccgatacgctcctccatatagggattggttttctcgtcgaagtcatatctccaaatcaaaggagcatgttcggcagtcaatacaggatacttatatcgaacgtaaaccccgttatttttattgcatttctcgttttttcttgaaataagagcctcatactcttttctcaatctctctaactcttgtaccataaccatataatatcttaataaataatcttataatcaacgggctatcaaaacccagtcatttcctcgtccttgtgttggcgatacgacttcaaaagcctcacttgtctcgatatttttataaaatattagttccccgttacgcggattaaaccactccaaccgaacgttttttcgttgagtccaaccggacagatttaccgttatgctgtgaccataaggcatataaaataaaacataatcttttccaccgtatgccacagcataatcgtcatcggtctgttccggtcgctctatcaaatattgcaatggtcttcctcggaaaaaatcgatagcctcacacaattttctgaaatgtatcatatcgcaagccccggctaaatccaggctttctttccaagttgtttgcgcatctatcatcggagaatacttatcggaatacatctgccacacttcattacaaccgtaagtatatccgcaagctccgctaaacatactttgatacaatgtcatacggacatcgaaatcatcgaatctaccattctccgatttaaaatcgataggtatattctcataccgaggctccccatctaagaccggtttgatcggctgtttctgtaaatcgttcagtagcaatcgcctatatatggcataatcgcgttgagcatgtccgctttggaacatattgaaatcgagccaagtctcatcatggaaccaaaaagaagaagaatgttccccttgcgggtggtaagtcattaaatgccgtttatcacactccttaatgccctcggccatcgctttccaaacggtaaagttcttaccctctccgctacgatctcctccgataatccatataatattgggagtgtcggcatatcgacgtccgagccatcggccatactcacgagcattcgcctcgtcgaatatctctggtcccgcaccccattgtttatccactttatcaccccacgtaggaagtaatcccacataaagccctttctccccggctatttctaaaacacgatctacccatttgaaataatcaggatcgggagtagacggagaaccgtttatcaatggcctgttaatcccgtccgaaccatcgagctcggacaatataaccgtttgaatcaccgtaaaccctttggctcgacgattttccatatacagttccacctccggttcgttcaatcgataaatcaactcccaagccgtatctcccaaatagagaaacggagttccatcggtatgttgcaaaaaacgcccgttgggagacacacacaagtctccgtgagaaaaatcgaccgatttacccgaccaactatccgctcgtacttcgacaagagccgggacaatccatgcaagaaacaatatgaatacatgccggggcatattgatcttatttttgcgttgtcaaatatttacccactacttccatctgcggacggtctttcccgtctaccggagtaatcgccataaattcgtctttcggccaccacggtccggcagcccaataacaaccgtttatatcgttttcctgcaagtaagacagaaatttatccaatacaaggttccaacgcgaatcactatcgggaataccatactcaccgaccatgccttcgaatttattggctttcagccattccacaaagggacgcacacggtctatacccttttcaagatagcaagaatcttcatcatatccacgtttgtaagtaccggaagcatctgcatcgaaatagacatgcgcctcgaatgccaacttatcggcaggatctttcaaatatttcaacgtatcgctaagttcaatccaacgttcagccgaactccaatgattgccccccaccataatacgagtatccatatcgaccgtacgaatggagtctatacacaattgcgccatctcgaaccaagtcgtgcaagaatccaaatcatgaggttcgttcattaacccataagcataaatattgtcaaatgatttaaattccgtagccagcgatttccagaacgaagccaaatgttccggtgtcaacccgtttgtcccgataatcgtatgctcgccattcatataacgacgacaatagttatgcaaatccaacatgacaaccatgtctcgctctgctgccgcagcaacaaaatctttcattttgtcgagatcatgacgattcagttctccgttcaattcatattgtaaacgttcccatttaaatggaaaacgcactaatttcaattccttctcattccaataatccaaatcggaagcctgaggataggtataatcggtattatatacacccgggaaattggaaccgaagtcggcacaagccatatttacaccataaggtttaccttccgttttagctaccttattgctacaactgcacaataacaaacctaacgcaactacaaaaactactcttttcatacaatatctgttttcctaatttatattccaacctttcacgcaaaccggatagtcgacattcacctcgataatttgcgactctcccggatcgagccacaaatagtttttcgacgcaataaattcatgagcatatccgggggattccacatagacacctatggccggcagtttcccgacattcgtcaccgttatctgtcgcccatctctcttcatggtaatctctgtacgaggcatcgacataattacccctcgacgaacttcataattggtaaaataataattacgagataatcgtttaccctccgaacaaacatcgacaacaaaaaacaacatggtcgatttcgtctgtactcgattcaaatcgagattacccaaattttttacggtttccaattcgctatgcccattgaactcccgacatacgacagtatccaatcgatcattataaactgtcaccgataccgtgtaatctttaccgttcaaccgacgacaatcatcgagtaaatacaacggcaacgatacttcttgactcgacaaattcgtccggtcgaaaagcaaaactcccgtcaatggtgcaaaagatttctgcacgaaataatgtaccggtttaatcgctccgtagtaatcgacactcgaccaagagacacccggataattatcgttcatcttgtaataaagagctccggttgtttcgggccacaaagtacgagcccgttccaacgtatgccttactccgacaacttgtgcgagctgagaccctgtaataaattcggccaatatggtatcgggcatgaagtatcccgaatattgcgagagcttgccaaactctcccattgtcccgaaaataggagtatgatgacggaaatgatcgcccggacgagacggccatctatctttctcttcggccaaataacgtctcacactctctatatgcggtagagaagcaattccgaactctccccaaaacggagaagtcatatttaaattatgattcaaatgagcatcgtcccaccagcaattgtaattatgatcgctgccgccccatgcctctcctcggtgaaacgggcgggaaccgtcgagctccaagctcaaacgccccatcatatcgatagccggcccgaaaggtttatctgattcgttaccggcgccccacataaccaaagaagggtggtttcggatacgtttcatattcctcactaccgtctcctgtaacatatcgaacggttgcgtattatggctgttccacgccgtaggccactcttgtatcaccataatgccatacttatcgcacaattcataaaaatcatcggtttcgggcaatcctccaccccacgctctcatcatctgaatatgctgacttttagcgatacttaacaagcggtcatatttttctcgcgaaaaatccatcaaagcatccatcgtacaccaaccggttcccttcacaaacataggtttaccattaatgacgaaagtccaattataacggtcttctcgctcgcctcccggaaacggagccatgtcgatcgtacgaataccgaacgatgtcttttccacatcggggcgagctccgttacgaggaataaatgcgactgtcatatcgtaaagagactgttctcccatatcattaggccaccaaaggcggggagcatctattttgaaatcgaatgaaaactgttcggttttcttcgacgaattaatttcatgttcaaagaattgaggagcaccttcaaaatttttaggcacgatcctaatttgtaatttaccttttagcggtgcatttatttttttgagagtcactgccaaccgcatatcgccctgcaaagaacgggtcgatacaaaaggcgcctctatttccaccggagcctgtgattccagttttaccgaacgccaaattcccaatgacggaatttgagcatagtgccaaccataaacacaattaaacaccacggtatacttccaactttcattagcgttaggaggccaatttcctaaaaacatctgaggaatcggatcgagtttcaccacaagcgtgttctcctttttcaaatatttcttcacagcgaaatcgggacctccgaacattccctcgtgagaacccagttttttcccattcagccaaacggtacaacgattcgctacaccgccgaatgaaagaataggattttcaagcagttcattcaatgtaaattttttactaaaccaccatgtcttgtaactctgttgctcggcgatcgagtcattttgcccgatataaggatcggggataatacgattcatcaacaatgcagtatgtacacttcccggtacaacagcctccacggcatcggtccaaacgtctttaagacggaatttttcatcgccgccttcggccatgagccatattccatcgagagagagagactctggacttcgaactgtatcgaccgacgaaacctgaatcatcgagattcccggcaactccgagagaatgtatttcgcagcaaaaccttccctatctatttcgtctaaggatttcccggcttgaacgggaaatcctgacaaaatagacactaaaataagagaactacctgtgatgaatcttttcatatttcttattaatatacttgtaccgtagttttatatttcaacaacgttgccaactgaggacgatctaccgtataattatcggtaggttgtacagccaatttataatcgccccaacgagggccggccgaccaataagtgccattcacaccgttttcctgcaaatatttcaaagcggaatcgagaatatccagccaacgaccgtcgtcatcgggcacaccatactcccctacaaaaccacgtttgccgttttctttcaaccattcgacgaaaggccgcagacgagccacaccggtttgaatagtcgcaccgtcttcatcgtacgatctggaataatttcccgaagcatcccaatcgaaataaacgtgagcttggaaaatcatgttgtcacagggatcaaccaagtttttcaatccgtcactcacctctttccaacggctggccgagctatactcattaccgctgatgaccaacatagtctcggtatcgacctcacgaatggcattgatacaagcctgtgcaatggtctcccacggcgttgtgcgcaacatgccataaggttcattcatgatgtcgtacccccagatacatttgtaatctttgaactccgcagccaattttttccacacatcgcagaagttctcaaccgtacattgagcattgccgataacaacgaactggttatcgtcagagttcacaccattggaatagacgcaataacgaccgaagttgtgcatatcgagcaagactttcatgttcaagtcctcggctgcttgcacgaattctttcatcttggccaactccgtagtgataagcgggccattcatttcgctttggatacgctcccaacgaaacgggaaacgaatcatacgcagtcccttctccttgaaatactccaagtcttttttggtgggatagccatagtgcgtgccgtcaacaccgggatatacattaccaaactcggctcccgacatattcacaccgaagtattcggtatgttcggttccaccaccattaccgccgtctcccccggggccatcttcattgccgcaggaagtcattgaagccatcaacacggcggcaaaagcaaatgtcaaaatctttttaaccttcataaaaatcaaaataaatagtgtatagtttaattaaagcgataagccggggcaggacgttgtcctacccgacttatcacagttattctcagcctatttttttagaaaagcggaagttgcacatgctcaggtcgaagtccatggcatcggtcggcgtgaatacaattttccactccgtgttatccggtgccgggctacagccatcgggaagaatcgtattttcacttacctcgtccaagcctatgcgcatagtacgccacccgccataggtattgacaggaattccactcgcaccaggcatccacatgaaattacccaaagctatccgcgtggtcgagttcagcggataggaagcattcgtgcaaacctcgaagcataggttatacgcagcaggatcggcagccacctcggccggcacttgaatgtagcctgcccacaacaccatccaaccccaagcgcccacattcccgtggaaacgcaagtatttcataccctcattcaacggttcggggtaaccatctccctctgtaccatcacacaaaaagttgagagtattatcggggaattggctggaatgagtaaatccaccagaacccggccaatcgttgaaatcgaagatttgatgcccagtattcatatacgggatagccaccggctcagccatctcaccgccctgaatggtcaggtcggtattgggctgggcgttggcggggatttgcagcgtaatatccgagcgggtagcgtcgattacggtacaaatcgcattgcctatgcgcacatcggcctgttcgacggtaataccgtaaaggtcgaagttatcgcccgaaatcaccgtcgtatcgccgggattggtaaactcattttgcaaaccgtcgattttcaactcaggaatcgataccgtgaaaggtctcgataccgaaccgttcttggtcgtgatgtaaagcatatcggtcacctcgcccggcaactgacggggaaccggagccaacaacatgtcgtaacgagcataaatctctttggggtcgacctccacatcattgaatttgaccgacactacattaccgagatttttaccttcgatgcgcaccatgtcctcaaagtcggcgccatcgatttcaaactctttatcgttggccagcacgattttcgtaatctcaggagctccgttggaaggaatatcgtcttttgctttgagatcctccacttccacaacgtcctgacaggcggaaaaggcaaacagcactgccgcccacgcagccatatattttatatttttcatttttatcaatttttcggttatacactaattaactccaaccgggattattgctcgaaatagcttggttcgtgagaacttcgagcgtaggaatggggaaaagcagatgtttctcggaacggctcttcacgtttccgcacacgtcagttccacccagtgcattcatcgcttgcaaataaataccccagcgaatcaagtcccaacggcgatcgccttccatggcaaactccatggaacgctcttccaagatagccgagcgcaaagccgatttggtcgaataatttttgagttcgcgcggcgtagcattacttctcttacgcacgtcgttgagcaaaccgatagcctcgtcattcgggcctttcaactcgttcgaagcctctgccataatcagaataacatcggcataacgcaagaacggatagttggcatcggtacgttgcagggtttgatcggtcacttgctgactgtattttgtcgtgaaggcgaagaactgctccgaaccgccctcgtcgcaacgccacccggcagtcacctcaggattgtcgaatggagattcgagatttgttaccatctcttgccatttaccgaaattggggaagtaggaaccgccgccccagctggtatcggagccttcgcgaatccagcagtgcagcacacctttgtctacccggtagtcgtcttcttcgaagaggaggtaccaatgtttgctgttacccactgtgaggctgttttcaatgtgccctttttcgtttgtcataccgcaatagtggtaggtaaagagggttccgtacaactcgtcgcccgacttggattgcaggctgaatagatgctcgctgcacgttttaccgctgggtgaccaaatcaggtcataggattccaagttgtgcgtaccgtaaacgccgcctttcacatccttggccacatcgtaggctagttgataatactcttgcgaattgaacgactcgtaaccggccacttggtctttggcgaaatccataggaaccggctcggtatacactttcgtgttggtcccgttgatgttctgcatcacaaattgcggaccggttttcaccgttacgatttcaccctcaggcatggcagccgaagcaatcgtagcatatacctttgccaacagaccggcagccgaagcagcacacacgcgaccggcttggaaattggtgtcggtgtttttataaagcatgtctttggcatcgtccaacagcggaatgatagtttgcgtatagacatcttcaataggtatacgaggactattcgtgtattgttgcgactggttcacactcaccgaataaacgggtatatcgccataggcgcgcaccagcatgaaataggcccaagctttcaaaaaatagcactcgcccagcacattatcgcggtgtctggcagtgaggttcttcatctcattgattcgctcgatggcttcgttggcccgattgatcacagagtacatacccgtccatactacgtcacaatggttgttcgaaccttgaaagttaccgttaccgaactggtcgaactgccaagtagcacccgacacattgtcgcaatcgtagtcgaaaggacggggcatattcccgtaacggaacatggaggagtgcaacgtttcgtacacaccggtcgtccacatatcggctccgtcgtcggaatcgggcacatcgtcgggagagataaagtcgtagggtttttcttcgagcatatcttcgcacgaagtgaagaccggcgctgtcgccatcgccaaccccaacatggtcacatatatcgataatcttttctttttcattgtcttgcaaattataacgttacttttacacctaaactgaatgtccggcttgcaggataagaataaatatccacaccacggcgggaagcatcctggccaaacgtattcacatctggatcataccaactgtaaccggtaatcgtaaacacattgttcaccgtaccgaataccgtcaaattctctattcctttgcaaggagaaccgaagttataagccaagttgatggttttaagtttcaaataagagccatcttcgacgtgacgatccgaaattctccattcacgagtctgagccatcgtggcacgaggccatttggcattctcggtgttatcaggcgtccaacgactttcatacgcaaacttgggaatgttgctcacactctgcatggaaatgttggtaaggttggcattgaagatgtcgttgccataagttccctggaagaacaagctcagagtcaagtttttccaacggaaattacccgtaagaccatacgtaaaatcggggttagtatcaccgataatagcacgatcctcggtcgtaagtttaccgtcaccgtttacatcgagatatttgatttcacccaccatacgttgagcctctacgtcagagacgttagcatagagaggatcggcgcgcacctcggcaagattatcataaaagccatcttctacataacccaatattgcaccgatgggcaatccgttacgttgaataaacacctctttggcactataccacaggttattggcatattggtcggcggtgagaccaccgatgcggttacggttgaacgcgatgttggcgtcgaaatccaatccccagtctttggtatctatggcatagaattgaccggtaagttcgataccttcgttcgtcacatggccgaagttggtccacatattggaaaaaccagtcgaggagggaatcgacacgtattgcaacaaatctctggttttcttgtaatagtaattcactgagagggcgatacggtttttcaagaaaccgaagtccaaacctacgttatattggtcggtagtctcccatttcaaatctttattcaacgggcctttactagtatctccggcgaaaccgctgtcggtaatacctccgaaaggatagtttgccgaacccaacgaaaccatcgtctgatagctattgataccctggttaccggtctgcccgtaactggcacgtaatttcaagttgctgaatatgttcaagtttttaataaaatcttcttccgaaagcacccaagcgacagcacccgaagcaaagttggcaaatttgtttccgggagcgaagcggctcgaaccgtcccgacgatacgaagcagtaaagatgtaacgatctttcaacacatagttggcacgacccagcaatgaaaccaatgtagcctcgccacgattactggtgggagcgtcgatggtcaacgcttgcgaaaggttgtagtcttcggtaatgtcggtagggaaatttgaggcgttgatagccttgccaccccagttggtattttcataagtgaaaccggctactacattcaagtgatgaatatcggcaaaagttttgtcgaaggtcaacacagactcggccgttatattttggtagaagttatcactcttaccggcacgaccgttgtagtttttaccttcacctgtttcacggggatagtaggtagaacgctcgttgtcggtatagctcataccgaagttctgacggaagcgcaaccaatcggtaaatttaatctccaagaaagccgaggtaaagacattgatcgatttcaattcgtccttagccgtatttacataggtacgggggttggccgacagccagaagtattcatcgtcttgtgtatggtcgcccacataaatcgtgggaggatacaacatggccgaacgaatgatactgtaatcataggaattagatttggcaaaacgggtattcgacttggtaaagttgatattcaagccggtatttaaccacgattttacttgactacccacgttggcgcgcacagctaaacggtcgtaacccgagttgcgtataataccggtttggtcggtatagttacccgagaaagcatagtgcgatttatcgttaccacccgatacgctgatgttgtactcttgggtaaaggcgtcttgcaagatttcgtccaaccagttagtaccttcgacccactcacggtttccatactcgtcctcgtgccaacccggattcaagaagtcttcgggtgcgggctcatacgtacccgactcaggtataatgttgttctgcgggtcacgacgataattccagtcaccccggtaaggcaggtaagcatacggagtgttgtcgtacaaagcgttgttgatcgtagcttcgttcacgaagttggcatactcataagcattgaggctctccacgattttcgagatcttcgaaagaccgaagttcgccgagaattcaactttggcagctcccgatttaccttttttcgttgtaatcaagacaacaccgttggctccacgagaaccgtagatagccgttgccgaagcatctttaagaacatcgatcgactcgatatcgttggggttaatcaacgacaacggattggaagtggtgttgttgttttcgtttgcgccgctcgtcggtgcgctacccgcatcgaaagggataccatctacgatatacaacggttgtgaactggtcgaaaacgagtttgcaccacgaatggtaatactcatacccgaaccgggagcaccatcgttagaattaacttgcacaccagccaattttccttgtagggcttggctgaaacttgtcggattaccgatcattaaatcctcgcttttgatagaagcgacggctcccgacaaatccttcttacgcatcgtaccataaccgatgacaacaacctcatcgagcgattttgaatcctcactcaactgcacgtcgatctgtgttttattgcccacggttacgtcttcctttgtatatccgataaatgaaaaacgcaacaccgatttaggacctttcaccacaatcgaatattgtccgtctacattggtaattgttccgttacctttcgaattcaactcggtaacattagcgccgggaataggtaagcccgaatcatcggctactactcccttcaccactatgtccgccatagcggtcgttgcccaaaacacagccactacaaacgacatagctctgagcattttacccaccatttgagaacgtgggaaagaaaacaggtttcttttcatttgtaataaatttaaaattaacaatcttattttgatattatttcttctctttctttgtgcgatatacagcctcgttatattgccgtataaacttgcggctttggcgaccggccggcttaatgagagattcgtcccaaccaccgtttttgtcggctctcggtaacaacatcgaacaagtctcgtttttgtccgaaattgaccaattcacccaactgattttatgagcttccatccactctacccagcgagtccactcttcaatgtccaatggaccgtcacctgtacattccataccggcacattccgatacgaaaatagggatcccctgctcccaagcagcagtagctctatctctcaattcctgtttatgggtagccgcataaaaatggagcgtatacattatattattgaaaccctgcaaagggtcggctgcaaccaaatgtaaatcttgatcccaatgcggacttcctaccaatattatattatcggggtcatatttccttatttgggtgataatgtcggtagcatactctttcacactctcccaagtattttccataggttcgttataaatctcataaatcacatgaggatactttccgtacttctgagccatcatcgaaaagaaagcctttgcctcttccttctgaggataataagtatgccaatctatgattacatacacattatttttaatcgcagcctttacaaccgcatttatacaattaagagcgtgttcggggttctctatataattatcttctatacaagttcccatcgcagcacgcaatacagtgcatttccaatcttctttcagccactttaccgactttttattataaaatcgaggccacaaattgtgccaaccataactaacgccacgcaacacgacaggttctccctgctcactacaaagttgatttccatttacttgaagctgaccgtataattttaccggatcagccgccatagcagatgatataacaccgaataataacgaaataatgaatagctgttttttaagcataaccatgatattaaatttacgttacaaaataatagtaaaaaaatagcgcaaaaaagtactttattatccgataatgatacttttttacctcaaatgtgatttttcaataaaggagaagcgaatcaagaaatctgcaattgatctaagcacctgtttatcaacaaaaactataatagacgaccgccccgataaaatgttttatacaaaaagcattcaagatttatttaaaatttttcgaacggtattcaaaagccatttattcatcatgatcatctaaactatcccaaatagagtcctgttgttctatatattcttcatagtaataagcgaacccctttctttctggaatacccaacgtatcgcaccattctttataatcggcctccaattgcttatcctccgccatcatcgaccggaatatatcttccgatagatcgagggtccgatactgtttaataatatcatcaaatgttatggtaatatcattactcatggctttttctatttatcaattaatatatcttcgtatttacaaatataactattctttcataaaaaaagttctacaaaaaacaaaaatgtaaaattaatcactccccggaatgcagccattactatgtaaacgcaaaccgataagaaaaattattccctttaccaagaaaaaagtagaactttcgattaaaaagttcaaaatttctcgaatataggaatcgttacttcataaaagaatgattatctttgtttcagaagcaaaagagcagcgcaccgcacaatcaaataaatttgtttctgccttcttttgcgctatctttgcataaaatgcgaaaatacaaacatgatttacaacgaacggaacattcgaaaagagattgtgctggaagccgctaaacaaatcatgatggcggcccgcacagcacccaaaggtaaaggagtggatattatcgaaataattacactctcgcacgatagccttccgactctatcggaaaatatgcgcagcgaagggaaaaaacgcggcatgatgttttttctgcgcgatgccgataatatagaacaagccgacgcagttatcctcatcggaacccgccgacaccccttaggtttgaattgcgcatactgtggagcgaaaacgtgtggtgaaaatcctgaaagcaatccttgtgcgattaactctatcgatgtgggaatcgctatcggatcggcttgttcgaaagcagccgacctccgtatcgacacccgggtgatgttctcggcaggcacaaccgcacaatctatgaatctcctgcccggctgtaaccaaatcatcgctttggcattgagtgtatcgtccaagaacccttttttcgaccgtaaatttcaagctccgaaacaatgacccctaacgtttcctttccggcagaatggtatccccaatcgggcatacagctcacttggcctcacccaaacaccgattgggcctacatgctcgacgaagttaccgactgttataaaaagttggcaagcgaaatttcccaaagggaaaagctcatcatcgtcaccccctgccccgacgaagttaaaaaacaattacaggatacgatcgacatcgaatccgtccgattcatagaatgtctcaccaacgatacatgggcacgagatcacggcggtatcacggtattcagagacggagttcccgttatatacgacttcaaattcaacggctggggactcaaattcgcagccaattacgacaacctcatcacttcgactctatataacgaaaacgtttttaacgccctatacgaaaataagctcaatttcgtactggaagggggagccctcgaaagtgacggagccggaactttgctgaccacaagcgaatgtctgctatctcccaaccgaaatggagaatggacacgacccgttatcgaagaatacctcaaacggacattcgggctgcaacgcatactatggctcgaccacggctatctcgccggagacgacaccgatagccacatcgacacactggcccgatttgcagacgaagatacaatcgtttacgtacaatgctccgattcggaagacgaacactacgaagcattgcgtaaaatggaagcacaacttcaaaccttcacaacgatcggcgggaaaccgtataatctgcttcccctacccatgcccgaagccgtttacgatgaaaacggagtgcgtttaccggcaacttatgccaactttctcatcttgaacgacgcaatcctgtaccccacttatcgacaacctttgaacgataagaaggcatttgaaatacttcgacaagcgttcccgaatcgggaagtcgtaggaatagactgttcaccgctcattcgacaacatggttcgttacattgcgtaaccatgcaatatcctcgaaatgtattacgataaatatatcctgtcatgaccgaaaagaaaatcactgtcggaattatccaacaacaaaataccggcgacatcgccgacaacaaaaaaaggctgaaacaacatatcgaacaatgcgctgcaaaaggtgcacggctcgtagtcctgcaagagctacataacagcctctatttctgtcaaatagaatcgaccgataatttcgatttggcagaatccataccgggagaatcgaccgaattttacagtcgtatcgccggtgagctgcacatcgtcttggtaacctctcttttcgaacgacgcgcagccggattataccacaacacagcagtcgtgttcgacaccgatggttctatcgccggaaagtatcgtaaaatgcacataccggacgacccggcctattacgaaaaattctatttcacccccggcgatttgggattcacccccataaaaacctccatcggtacactgggggtattggtatgttgggatcaatggtatcccgaagcagcccgcctcatggcactgcaaggagccgacatgctcatctaccctacggccatcggctgggaaagctccgacaccccccaagaacaaaagcgacaacaagacgcgtggattatttcccaacgaggacacgccgtcgccaacggactacctgttgtagctgtcaaccgtgtgggacatgaacccgatccctctggacaaaccaacggcatacaattttggggacacagtttcgtctgtggtccgcaaggcgaaatactggccgccgctcccgacgacagcgaatggtgtgaagtcgtggaaatagatttaacccgctccgaaaacgttcggcgctggtggccgttcttgcgagaccgccgtatcgactcgtacaacgatatattgcgaagattcatcgactaaccgtatctcgaaaaacaaaagcacggaatatcttcacccgattccccgatgtaccgaaccttcgttataaaataataaaaaaggacataaatctccgcaaaacagctatttttgtaaattattagcgtcaagatatggacacgaaaaaaaatatcacggacaaacaactggcattggacaagcgttatatacgaatggcgcaaatctgggctgaaaactcttactgccagcgtcgtaaagtcggagctttaattgtaaaagacaagatgataatttccgacggatacaacggtacacctgccggattcgaaaactgctgcgaagacgaaaacggccacacatttcctttcgttttgcatgccgaggcaaatgccatcaccaaagtcgctcgcagcaacaacagcagcgacggagcgactctatacgtgacgtcctcgccttgtatcgaatgttccaagttgattatacaagcaggtatcagtcgtgtcgtattctcggagtactaccggctccaagacggtatcgaacttctgcaaaaagccggcatacaagtggatttcattgatccgcaagccgatgaatctataaagtaaaaagctaaactatcctattaaatatgaataacgaaaaagctcgtttcgtctgggtcccgttactaatagccgtggctatcgccgggggaattttaatcggacgatttttctctgccgaaacctctttcggcaaaacggcaaggtatgacaaaatcgaaagtttgttgcaatgcatcgagcaacaatacgtcgacacggtaaacaggaacgatctcatagaaaatgtcgtgcccaaagtcataggagagttagatccccactctgcctacattccggcaaaagatttggaaagcgtcaatgaagagttagaaggctcgtttagtggaatcgggatacaattcaatatactgaacgacaccatcaacgttgtcagcgtcatttccggcggcccctccgaaaaagtaggaatactggccggagaccgtatcatctcggtcaacgattctgctttcgttggtaaaaacatcagcaacgaaaaagtcatgaaaaatttgcggggacctaagggaacgaccgtgaaactcgaaatcttacgcaaaacagcgaaaaatccgctcatttatgaagtaacgcgcggagatattcccgtcaacagcgttgatgcggcttatatgctcgacgacaaatcgggatatataaaaatcagcaaattcggcaaaaccacttatgacgaatttattacagccctctccaaactacacaatcaaggagccgaaaacttcattatcgacttgcgtggcaatagcggaggattgatggacgccgcaatcaatatggcgaatgaattccttcctgccaaccgattaatagtctatgccgaaggaaaagcattcgaacgggaagacgccgtttcgaacggcacgggaacattccaaaaagaacaagtcgtagttctcacggacgaatggtccgcgtcggccagtgaaatattcgcaggagccatacaagacaacgacagaggtttgataattgggcgccgaacattcggcaagggattggtacaacaacaaatccccttccgtgacggatcggccattcgactgacggtagctcgttactatacaccttccggccgttgtatccaaaaagaatatcaattagggaaatccgaagattatagcatggatatcgtaaacagatatatgcacggtgaatttttcaatgccgacagtatcaaacagaacaaagagttggtgttccacacggtcaacgggcgtgaagtatacggcggaggcggaattatgcccgacatattcgttccacgagacacgacgggagtcacctcctacttcaacaacgtagccaacgaaggactgctctatcaatacgcattcgactacacggataaataccgcgacaaattgtcaacagcaaaagatgtcgaatccctattgagtatacttgaacccaacactctcttaaacagtttcgttcaatacgccgcccaaaaaggaatacgcccccgtcccgtttacatcaatatttcaaggaaattgatcgtaaacacgttacaagcatacatagcccggaacatattgggagaagaagcattttacaaactgctgctacgagatgacgaaaccttgcgaaaggctcgggatatagtgaataaaggcgaaggatatcccgaattgccggcagaaaatcaagttcctcgatgagcgaaaaacgacaactgcggcaacaggtcaaacagttgaaacagactatctcctcggaacagcgagtagctttatcacaaaatatatgttcagcaatagaaaagctacccggtttcgaaacagtctcgcgcatactgctttatcacgccttgcccgatgaggtcgataccggtttaatgttatccagatggagcaaaaaaaagcaactgtacctacccatagtgaacggcgacaatctcatcgtcagcccctacgatcctcggttccttaaacaaggggctttcggtatttgggagccgggtgacacccgtgaaaccgatcccggttcgatagactggataatcgtacccggagtagcgttcgacaaaaagctgaatcgattgggacgaggaaaaggatattacgacaaactgctcgtccagacctccgccacaaaaattggaatctgctatggactgcaactgttcgacgaaataccggcagagccccacgacataaaaatggactttataattaccgaaaacaatatcattcatagaaaggacgaattatggcactaataaacgccgagacaaagctttgcgacgttatcttgcacgaaccctccgtcataccggttatcaatcgattcggtattattctgggggtcggcgacaaaagcatacgtaccgtatgcgaagaaaaaaatctagactgcgagtttttcgtgaccatactcaacacctttatcaacgaagactatttcccggaaaacaggctcaaatcattttgcgctacacaaatagtaaactacctcacccaaacgaatgcctactatgaacaattccagatacccaatatagaacgacatttcaatttcttgataaaccaaagcgacagcgagaacaacaatctcgaacttatgaagcaattcttcgacgaactgaaaaaagaattgttgtcgcgcatagaaaatgacaagaattgctggtttccctctatcaaagtcgctgccgaaaccctgcacggggaatattacggagaaaaatttcaacccgatacagaagaaaacgattctttggaagaaaaattagacgatcttaaaagcctgtttgttattcatctaaaaggcgaatacgatctcaatctttgccacggtgtcatattcgcaatatacagcctcgaaaaagatatcaaacaacacaaccggataagaaacagaatactccgtcccattgccgacggtatgttggaagcctgccgaaacaaaagtttcaagtaatcgaagtccatgcgtatcgccatcgttacaccatacacgttacttaacttaggattgaagcatttactacaaaaatacttcgacaccactcctatattatacaacgagatttccgagtttttcgataacgcgcccgaacaattcgatgcctatattctttttgccgatacaatcatcggatacagcgattttttcctccctcgcaaaagcaaaatcatactcctcgcctccgatgggtctcatctgcccgaaacgtcaatgacttcgttagacatacacgaaagcgaagaatctctgctcgaaaaaatacaacagttcatcgagcatttagacaaacaatccgaaatcctgcctcacgaattatcgcctcgggaaaccgaagtattgaggctggtagccaaagggctcatgaataaagaaatagccgatcgcctgaatataagtataaacacagtactcagccatcgaaaaaatctaacggccaaattaggtatcaagaccgtatcggggcttagcttctatgcaatgatgaacggttatatatcggatatagacgataaataacaccatacaattttttgaatataattatttttatcgtttttcgataaaaatatactgtttttcttgttcattcggaaaatattctatttctttgtcctgacaatatagaatatgacgtatatgttttacgacaaacgaacacagagaaaaatacaattattgaatttgctaatcgcattactcattctcattcccatacttctcgatttctccaaaggatttatgatgggactcaactcctctgtcatcggattccaaaatgggctggaagaatcgacttttcagatttgcacggtcaaaccggactcattgcaattaaaccacataggaacgatcccaagtctcaatctctcgtccgacaatattctctaccttccggcatcgactacacccgtagcactgagcataagttccgtaatactgactgggctttctttcatcgcccttatttgtatgattattaaattagtgcaactgataaaatcggttgcctcagatggacttatgaaccgtagaaacatcaaacgattgagattactctcctatttcatgattacattctacctcgttagctatatagattcctttatcaccacgagctattatcgttcgcacctctcgttgggagacaatcaaatttgctatcccgaattgagcgcttcggtcactattgcatttattttgctgttactagccgaaattttgaatatagcctataaacaacgcgaagaattagacctcactatataaataacgaccatgcctattattgtcaatctcgatgtaatgatggcgaaacgaaaaatttcgcttaatgaactttcgggcaaaatagatatcactccggccaatctctctatcttaaagacagggaaagccaaagctatacgtttctccactctcgaagctatttgcaaagaactgaattgccaaccgggagatatcctagaataccaagacgaagaaaatacaatataactcactttaaatcaaacaaaaatgaatctgaaaatggtaaaatcgggattagtgcttgcctgtgtagcccttgcccaatgggtatcggcacaacaagctcctcagatggaagcattgcccatcgatcccaacgtacgctacggagtcctcgataatggtctcacctattatgtacgtcacaacgaaacgccgaagaatcgtgcagaattccacattgcacaaaaggtaggttcaattctcgaaaacgaagaccaacgcggattggcccacttcctcgaacacatggcattcaacgggacagaacattttcccggtaaaaacatgttaaactacctcgaaaacaaaggtatcaaattcggtgtagacatcaatgcctataccggattcgatgaaaccgtgtatcgtatatccaatgtccccactcaaaatcaaaatttagtagactcctgtctactcgttctgtacgattgggcctgtgccatctctctgaatgacaaagacatcgacgaagaacgcggagttatccatgaagagtggagaactcgcgccgatgccaattggcgtacatgggaagtcacggttcctgtcatgtttgccggtagccaatatgccaaccgtatgcccatcggaacaatggaagttgtcatgaatttcccctatcaggcactacgcgactactatcacaaatggtatcgccccgaccaacaaggcattatcgttatcggtgacttcgatgccgacaaaatggaagctcagatcaaagaactgttcggtaaaatcaaaatgcccgaaaacgcggcagaacgtatctactacaccgtacccgataacaaagagcccatctttgcattccacaaagacaaagaagccacatacacccgggtggatatctatatgaaacacgaccccatgccccgcgaaatgagaggaactatcaacggggccatcaatgactatatgggacaagttgtcggtatcatgtttaacgaccgcatctccgaaatcactcaaaaaccggatgctcccttcattgccggagcgattttcgacggagatttcttcgtttccaaaaccaaagatgcatttactcttatcgctttgggtaaagacaatggagcgatcgatgccataaaaggtattatgcgcgaagcagaacgtatcgaccgtttcggattcacagcttccgaatacgaccgtgcccgggctacattgctttctcggtatgaaaacatgtacaaagaacgcaacaatcacaaaaacatcgactacgccgaagaatacatcagacacttcatcgacggcggatatattccgggtatcgaaatggaatacaacctgctcaaacaaatatctccggccattacggtagatatggtaaaccaatacatcaaaacgcttattagcgaagacaatatggtaatttcactgaccggtcccgataaagaaggagtatcctatcccgacaaagaccaagttcttgccgctatcaaagaagtcgaagcagaagaaattactccctatgtcgacaatgtatccaacgaaccgctcatttccgacgaaccggttgcgggtaaaattgtaaaaagtgctgccggaaagaaatttggaacaaccgaatggaccctttccaacggagtgaaagttatcctcaaaccgacagacttcaagagcgatgaaatctctatgcaagccgtaagcaaaggaggactttccctttatgattacacagatcgtgctttggttaaaaatctgaaagccgtcaatgaaatcgttgaattgagcggactcgggaaatacggaagaacagacttgatgaaagcattagccggtaaaaccgtatctacctatttttctttgggagaacctatggaaatgatcaatgcctcctgcgcgaccaaagacctcgaaaccatgatgcaattggtatacctcacctttaccgacatacatcgtgacgaagatgccttcgccgcatggaaagagcaaatgaaagcggtactgacaaactatgcgaacgatcctcagttcattttcagcgattcgctttcagcaacgctctacaatcataacataatgcgggaacccttgaaagccgaagatatcgacctgattaactacgaccgcattctcgaaattgcaaaagagcgcacagccaatgcagccgattataccttcatcttcgtgggtaatttcgatatcgactctctgaaaccggttgttgaaaagtacatcgcttcgctgcctgcaaacaagaatagagacaaagtcggtaaaatatccaccatacaaccgggtcttatcgacaacaacttcacgttgcccatgcaaacggctaaatccactgtgtacgccgtctattcgggaaaacaaaaatacgacttgcgcagtaacattatgttcagtatgctcgaccaaatcatggacatcgtatataccgaaactatccgtgaagaagaaggcggaacctacggcgtagggacatcgtctaatttatcgcccgtcaacaactcatggttgttcctatttggattcgataccaacccgcaagacgaaaaacgtttgacagaacgggctcacgccgaactaaacaaagttgttaccgaaggccctcgtgaaaaagacttcaacaaagtaaaagagtatatgcttaaacaacatgctcaaaaccttcgcgaaaactcctattggatgaacattatcaaatccgatgttctcggttacggcgacaacaataccgattacgaaaacattgttaacggcattacgctcgacgatatgaagaaattcacaaagaaactcttcaacggtaaaaacatcatcgaagtaacgatgaccggagttgtcgaagacgaaacgaaataaaaacgagaatgtcaaaactaaaatgaccgttccgaaaaattgcagcttgtaactgctaaacctaaaaaggaagagccgtatcattactccaaacagagtttgatacggctctttctttgataaaattggtttgtgataccctcttctcacctttacactcgaattttaatctagccactccccttatgtttccgcaagaatagcattgcggggtatcgcacttaaaatcaaagcaaggcaaaaagtgaaatacttctcaacctcccccctgccgtgtctcgtagcattgcgggaagttgtggtaacaatagggggaaaagggcgaggggattagaatacaagcaaaagcacaaaccccaattccgcctttatcgggcggcgaagtcgcaagggagacggaagaaaaagggcgaggactgtttaagcggagggttactatcaccctcctccctgccgtgtcccgtagtattacggggtgttttgcaacgcaaaatataggggaggtgtccgaaggacggaggggttaaatcgaaattgttgaatcttcgacaagcaaaggaatatggaagagaaaccgaaaaatctatcgtttcttcggagagagtttgttaaaaagaaatttatggctaaaccttatagctacccgattggcttccgaaataaaaaaagcctctgtattcagaggctttttttatttacgatcgattttctatctgaatctcaattccccgaaataatcgggacggtgaaaatcgggcttttcgataggtatcggcgaccagctcaaataatgaggcaaagacgatccatcggcacatttatagaaattagcagagagactctccggcaactgcccgccgtcaagccctataagttcaaaaggtatggcgaccaataaattccacgagaaaagcccctccatctcacaaaacggtttattaccgaccgacgaataacgtttgattttagccattttatcggctgagaagtgctcggcatcttcccgcccggtgcgacgggcagccaaagccgttcctatacagttaaactcgaaattataataatacttctcacccggtatctgcacgaaaaactctacgcagctatcctcccagacaggagaattatcggtactgttcacagcccgcaaataattgccctttacaaaataattgatgtagagacactccttatcacgagctatataaaaagaggtaataggcttatacggaaactcgttcggccaatcgacgcaatctatcgcctgccgcacaccctgtgcctccaaaatctcggaaacctgcgacaaaggtttgtcgcacaatccggcaacaaatggaacttcaataacttttttcatgatgtttataaattatacaaaaaataatcttttattccccaaacaaatcccacaatagacataataatgatgataatcccgattcccctatttattaaccaaatactacgcacattaaaacgggcacgaaccttattgatgacgtaagttatcaggaaccaccaactgacagctcctaacaaaatagacagataacccaccacatgatgccccaattgtgattcgggcaagaaaaaattaaaccgggcaaataggcctatataaagaaataatatcagaggattggaaaaagtcaataaaaacgccgtaatgaaatcctgcgtaaacgtattgatggaagaattggctttacgaatattcttggccggattctggcgatacagatacaacccgaaccccaccaaaaccaaactgcccaaaatctgcaaaatattttgattagcctctataaaatcgatgacgatagacatgcctaagcccgtaagcaatgcatatatcaaatcggataatgcagcacccaatcctgtcacgaagcccgaccatcgccctttattcaacgtacgctgtatacacaatatccctatcggtcccatcggcgccgacaccaatatgcctatggctaagcctcgaattatagtatatagcgttaagtccataaagtctaaaaactaccttattctattgaaatacggtataaatcacaaaatagtatgacattgacacaaaataaatttcatttttgctcctgtaaaacaaaagctcacctctattgtccgtcaaaaacggcataagaaaaaggcaaacccctattttcttgaagatgcctatgcacaacctattctcgattcgtgaagcaaagatagtgaaaggtgagcgcagagacaaacggaaatcgcatttccgacttggctatgccgaaccgcatcctattttcgcatactgtgcaaagataatgaaaggtgaacacagaacaaaatttattttagttctgttgaacagccgcctatcttattttatcgaacataggcaaggttggacacagcaaaaaggcatacatcaaccacaacgcaaaaatgcccctatattcgaccgtaccaaatacagagaaaagactcgtcctcctcttccctcatttgagagtctcgttgagtcaccccctcccctatactcgaaaaatcgaacatcaaggaataatatccaaaaattaggaactgttttgtcctattttttttgagtggacgagggtttttccttaattttgcaacgaaaataaatacgttttctttgtctcgatttttcagtcgggaaaaagaaaaacagacatgccactaaaaaacaagacacaatggtcatttttttcaaaacctccgttcaaaacattattgcagttcaggccgatcacagcttttcggcagatgagactaaaaaattatcgtggcttttcgacaatgccgagcttctccctgcttcaacgttgaagggctggtttatcgggccccgtaaagagatgattaccccgtggagcaccaatgccgtagagattactcaaaacatgggactcaccggtatctctcgcatcgaggaatttttccctgtaacagacggttctgccgaattcgacaaaatgctacaacggttgtacaacggtatcgacggtaaaattttcgacatcgacaaacaacccgatcccattgtgtacatcgacgatcttgccgcatataacgaacaggaaggtctggccctcagccccgacgaaataaactatctgaacgacctaagtaaaaaaatcggacggaaactaaccgacagcgaagttttcggattctcgcaagtcaattccgagcactgccgtcataaaattttcaacggtgtcttcatcatcgacggtcaagaaaaagaaagttctctttttaaattgataaaaaagacctcggaatataatcccaatcggttggtttcggcatacaaagacaacgtggctttcaatgccggacctaccgtcgagcaattcgctccgataaatccccaacaacccgacttcttcgaaataaaagatatcaaaacagtcatctcgttaaaagccgagacacacaatttccccacgaccgtggagcctttcaacggagctgccaccggtacgggaggagaaatacgcgaccggctcggtggcggacgtgccagcctacctattgccggaacggcagtttatatgacggcctatcctcgtacggaagaaggacgggaatgggaagaagattccatgcaacctcgtccgtggctttatcaaacgcccgaacaaatattgattaaggcctctaacggagcttctgatttcggaaacaaattcggacaacccctcatctgcggctccctactcacattcgagcacgccgagaacggtaaaaaatttgctttcgacaaagtcattatgctcgccggcggtgtaggattcgccaacatgcgcgacgcacttaaaggcacgcccgtagccggggaaaaagtagtggtaatgggtggtgacaactatcgtatcggtatgggtggaggagcagtctcatcggtagaaaccggacaatacgacaatgccatcgagctgaacgccgtacaacgagccaatcctgaaatgcaaaaacgagtatccaacgtcattcgggcgatgtccgaagccgaggaaaatcccatcgtctcgattcacgaccacggagccggaggccatttgaacgcactttccgagttggtagaagaaactggcggattgattcacatggatcaactgcccgtcggcgaccccaccctatcggccaaagaaatcgtaggtaacgaaagtcaggaacgtatgggtatcgtcattcgggaagaagacatcgagcacattcgtcaaatcgccgaccgcgaacgggctccgttctatgtagttggcgaaaccacaggcgaccatcgcttcgtattcgaacagaccgatggtgttaagcccatcgacttagcgatggaagacatgttcgggaaagccccccgtaccgtcatgacagacagaacagtcgaagaaacctacgaagacgtaacatacgatcaaacgcaactcgacgaatacgtggaacgtgtgctccaactcgaagcagtcgcttgtaaagactggctcaccaacaaagtggaccgttccgttaccggaaaaattgcccgccaacaatgtcagggagagatacaactcccattgagcgactgcggagtagttgccctcgactatcgaggacgcgccggtatcgccacctctatcggccatgcgccgcaagcggcattggtcgatcccgccgcaggatctgttctctccatcgccgaagccctcaccaatatcgtttgggctccgctctccgaaggtttagacagcgtttcgcttagtgccaactggatgtggccctgcaaaaacgaaggcgaagatgcccgcctatatcgggcagtcgaagcatgcagcgattttgcctgctcgctcagaatcaatatccccaccggaaaagacagtctgtccatgactcagaaatacggaaaggacaaagtctattcgcccggtacggtcatcatctcggcaggagccgaagtctcggatatacgtaaagtcgtatctcccgtcctccgcacgggagtcaacagtacgatctactacatcgatttctcgttcgacaagctcaaattaggaggctcggcgttcgcccaatcgctcgacaaaataggtaaagaagttcccactgtacaagacagcgaatactttgccaacgcgttcaatgccgtccaagaattaattaacaaagagttgattctggcagggcacgatatctccgccggcggtatgataaccacgatgctcgaaatgaattttgccaataccgaaggcggtttggaagtttcgttggacgaaatccccgaaaaagaccttgttaagatattgttcagcgaaaacccgggtatcttgattcaagtagaaaaaaccgacgaagtcgaaaagatattgaaaaaagccggcgtagcgtttatccgtctggctcgtccctgtgacgaacgccatctgctcatacacaaggacggagccgattatcaattcttcatcgatcatttgcgcgacgtatggttcgagtcgtcctatctgctcgaccgcaaacaaagcggagaaaaagcagccaaagaccgcttcctcaactacaaggaacaaccgctgcaattccgtttccccgattcgttcacgggaacgctcgcccaatacggtatctcggccgaccgtcgcacacgctccggtgtgaaagcagccatcattcgtgagaagggcgttaatggagatagagaaatggcctattcgctctatttggcgggattcgatgtgaaagatgtgcatatgaccgacctcatcagtggccgcgaaacgctcgacgatatcaacatgattgtatactgcggtggattctctaattccgatgtactcggttcggcaaaaggctgggcaggaggattcctttggaacgagaaagccaaagctgcactcgaccgtttctataaccgccccgacaccctgagtctcggtatttgcaacggctgccagctcatggtagaattgggactgctcacccccgaccacgaacaaaagcccaaaatgcgacacaacgattcgcacaaattcgaatctcagttcatcggattgacaattcccgaaaacaactctgtcatgttcggctcgttatcgggctcgaaactcggtatatgggttgcccacggagaaggtaaattcgagttgccttacgccaaagaacgatacaatatcgtagcccaatacacctacgatgcttatccggcaaatcccaacggatcgccttacgggatagccggtatcgcttcggccgacggccgccatttggccatgatgccccacctcgaacgagccatattcccctggcagtgcggacattatcctgccgacagaaaaaccgacgagattaccccgtggatcgaagcttttgtcaatgctcgcaaatgggttgaacagcacaccaaataaaaagtatattccgcagggcgggagggaaacaatgtccctctcgctctgttcgtttaatcaaataataatcaacacgacaacattacattatgggaggattttttggtagcataaaaaaagaatcttgcgttaccgaccttttttatggcgtagattacaactcgcacttaggtacgaaacgtgccggtatcgtgacgtatgaaaatggcgttttcaaacgggcgatccacaatatagaaaactcctacttccgctcgaaattcgaagccgaactgcccgaattctctggtaattcgggaatcggtgtcatcagcgataccgatgcacaacccatcatcatcagttgccatttgggaaaattcgccatcgttaccgtcgccaaaataaacaacgtagaagaactcgaaaaagaactactggcgagtggaaaccatttcagcgaacacagtaacaatatcatcaaccaatccgaattggtttcgatgattatcagtcaaggaaaagactatgtcgacggcatccgcttggtacaggaaaaaatcaaagggtcttgttctatgcttttactcaccgagcaaggcattatcgccgctcgcgataagtacggtcgctcgcctatcctcgtcgggcggggagataacggctacgccgtatcgtccgaaacatgcagcttcccgaacctcggatacgaactctgttacgacatacgacccggagaaatcgtccggttgacagccgatggttatgaatcgctcaaccagcccggtaaaaaaatgcagatatgctccttcctatgggtatattacggatatcccgcctgcgaatacgaagggaagaatgtcgaagagatgcgctttcacactggcttcgaaatgggtaaaaaagacgacatcgaagccgatttcgtctccggcatccccgattccggtgtaggcatggctctcggatacgccgtaggtaaacaaattccctaccggagaggtatcgtcaaatatacccccacttggcctcgcagcttcaccccttccaatcaagccatgcgcgagctggtagccaaaatgaaactcatacccaacaaaagcatgctcgacggaaaacgggtcgtattctgcgacgactccatcgtccgcggtacgcaactgagagacaatgtatccgatctctaccgttatggagccaaagaagttcacatgcgcatcagttgcccccctctcctgtacccgtgtaagtttcttaacttcacagcctccaaaagcgaaatggagcttattacccgtcgcaccatcgccgagatagagggtaaccccgataaaaatgtcgcagcttatgcacgcaccgggtcgccccaatacaattgtatggtaaactgcatttgtaaaaagctgaacattacctcattaaaattcaacccgttagaaacgctggtcgaatcgatcgggcttcctaaggaatgcatctgcacgcattgtttcgacggcagcagctacgaataagcccgtcagaaccgaataaaaccccggctcgttatgccgtccgatcatctgttctcgccgggcggcataacggttttttcgcctaaaagattgaaaataacaatcatttttgtaattttgcgagtcaatgaatcgacacagaatatacgaatatttataaatcataaatctcacattaaattatgagtcttaaaatcgtagtattggcaaaacaagtgcccgataccagaaatgtggggaaggatgccatgaaagaggacggaacgatcaaccgtgccgccttgcctgctatcttcaaccccgaagatttgaatgccttggaacaggctctgcaactgaaagaacaaaacccgggatcgacgattaccctgcttacgatgggtcctcctcgtgccgccgaaattattcgggaaggtttattccgtggagcggacggaggtatcgtattgaccgaccgtgcctttgccggagccgacacattggctacgtcttacgcactatcgtgtgccgtacgcaaaatcaaagattatgatattatcttgggaggtcgtcaagccatcgatggcgacacggctcaggtaggccctcaaatcgccgaaaaattgggaataccccaagtcacctatgccgagcaaattctgaacatagaaaacgggaaagccaccgtgaaacgtcgtctcgaacgcggggtagaaaccgtcgtagttcccctgcccgcagtcatcacggtcaacggttcggccgatgaatgccgtcctcgcaacgcgaagctcatacaacgttacaaatacgccaagacaccgagcgaaaaacaaggactgagcgaagaatgcttgaaactctatgaacagcgtccggccctcaacctttacgaatggagtgtaaacgatgtcgatgccgacctcgatcaagtaggtcttgccggttctcccaccaaagtaaaagccgtacaaaacgttgtattccaagcaaaggaaagcaaacgactcacggctgccgataacgaaatcgaagaccttgtcaaagaattgatcgccaaccacacgattggttaatgcccgtgtactatgaactaaaaaactaacgattatgaacaatctgattgtatattgcgaaatagaagacggcatcatcgccgatgtgagcctcgaactgctcacaaaaggtcgctcgctggccaatcaactgaattgtaaactcgaagcactggtgatcggtagcaacctcgacggtgtggaaaaacaagtattcccctatggagtcgataccgtttataccgtagacgatccccgcatctacccctacacctcgttgccacatacctcggtattggtaaatttattcaaagaacagaaacctcaggtttgcctgatgggagccaccagtatcggtcgcgacctcggtccgcgggtttcctcttcgctgcacagcggactcacggccgactgcaccgcattggaaataggacctcacgaggacaaaaagaacaataagacctatgaaaatctgttgtatcagattcgtcccgctttcggaggcaacatcgtagcgacgatcgttaaccccgaatgccgtcctcaaatggctacggttcgcgaaggcgtgatgaaaaaagaaatttacgatcccgcttacaagggagaagttgttaaactggatccgaaaaaatacgtttccgacaccgactttgtggtagaagtcatcgatcgccagatggaaaaatccaaagccaacgtcaaaggcgcatccatcatcgtagccggcggttacggtatgggatcgaaagaaaacttcgacatgctgttcgacttggcggctacattgggagccgaggtaggagcttcccgcgctgcggtcgacgccggatacatcgagcacgaacgtcaaatcggacaaaccggtgtcacggttcgccccaagctctatatcgcctgcggtatctctggacagatacaacacatcgccggtatgcaagacagctccatcatcatctctatcaacagcgatcctaacgcacctatcaatacgatagccgactatgtgatcacgggtacagtcgaagaagtaattccgaagctgatcaaatattataagaaaaactccaaataaaacatattttcgattctgtcgataagacaaagtcttgcgacaaatcaaagatagagagttaaattataatacaataaataatacagaacaatggctaatttttatttagataacagtgatctcaaacatcacttgaaccacccgctcatgaagaagctggtggctttacgggaacggaattactccgatgccgaaaaatacgactatgcgcccttcaatttcgaagatgccatggatagttatgaaaaagtgctcgaaatagcaggcgagataagcggcgaaatcgttgcagccaatgccgaagacgtagaccacgaaggtccgcacgttgtcgacggacatgtcgtatatgccaaaggtacgcaaaaaaacctcgacgctctggtaaaagccggattgatgggtatctctatcccccgtcgctacaacgggcttaacttctcgttggttccctacatcatggctgccgacatggtaagccgcgccgatgccggattcgtaaacatctggggattgcaagactgcgccgaaaccatttacgaatttgccaatgaagaacaaaagcaaaaatacctgccgcgcgtttgcgccggcgaaactatggcgatggacctcaccgaacccgatgccggttccgacttgcaagccgtcatgctcaaagccacatacagcgaggccgacggttgctggtatctcaacggagtgaaacggttcatcaccaacggtgacggacacattgcactcgtgctggcccgttccgaagaaggaaccaaagacggacgcggactctccatgttcatctacgaccgcaacgacggcggtgtaaccgttcgccgtatcgaaaacaaaatgggtatcaaagggtctcccacctgcgaattggtgttcaaaaatgccaaagccgaactctgcggaagccgcaaattgggtcttatcaaatacgtcatggcattgatgaacggagcccgcctcggtatcgcggcacaatctgtcggcgtctccgaagcggcataccgcgaagccatcgcctatgcacgcgaccgcaaacaattcgggcaagccatcatcgagttccccgccgttttcgaaatgatctctttgatgaaagccaaactcgacgcttcacgctcgctactttacgaaacgacacgattcgtagacatgtacaaagcatacgaagacattgccaaagaacgctcgctcgaacccgaagaacgtgccgaaatgaaagcctaccaaaaattggccgacgcattcacccctatggcaaaaggcatgtccagtgaattttgtaatcaaaacgcctatgactgcgtacaagtacacggagggtccggtttcatgaaagactacgcttgcgaacgcatctaccgcgatgcccgcatcacttccatctacgaaggaaccacccagttgcaagtcgtggcagctattcgccacgtcaccaccggcacatatctgcatcagatcgaagcatacgaagctgctgaaatcgcgcccgaactggaacctctgcgcgaccgcctcaaagctatgaaagccgcctacgtaaaagctgtcgaaaccgtcactgcaacgaaagacaacgaatacatcgacttccaagcacgccgcatggtcgaaatggccggtcatgttatcatgggacacctcctgctcaacgatgccactcgtaacgaatcgttccggcagtcggccgaagtatacattaacttcggcgaagcagaagttgccaaacacgccgcatttatcgaacgtttcaatcccgaaatgatggccgcttatcgcaaataaacgcaacatttcatatcattcgaggaggtattccagataaatggaatacctcttttttatatcggaaattcagtatgattccacttcttccctgacgtatcccgctgcattgcggggtgtggctcataaaatcggagcagaagcgaaagggaaatacatctcaccctcctcccctgtgtcccgcagcatggcggggtgtttttgcgcagcaaaatataggggagagccgaggagcatggcgatgaggagaggtcttaaaaagaccctcagtggagataatagaggtaaccctcctctccctctgtgttcctgaaaggaatatagggggagtgcccgaagggcgagggggttaaaaagactagcaaaagcacgagcaaaatccccgcctttatcggtcggtgaagtcgtaagaaagacggaggaaaaagggcgaggactgtccgagcgaagcgagttccgcagaccccgacggcgaccgtagcgacgaacccaaaagcccgataacagcggcggcgcttcttggttcgttcttctcgctgttgagaagaatgaacaaataaagtgaattagtgtaacaaggactttctttggcagagaaagaaagtcctttgtagcacaatcctccccctgccgatagagaaagtgtccgaaagacggaggggttgcaagaataacaaaaaggaataaagatatagtatcctaatctgccgaatcgggtgtccccttttcaccactatctttgaataccttcgacaaccagcgctcttgaacagtctccatcaattcataaaaattaggaacgaacaacgtacccaataccgtattcatcgccataccgaacacgacagccgtacccaaagctatacgactttcggctcccgcacctgtcgcgaacatcagcggaagaaccccgaagataaaagcgaacgaagtcatcaagataggtcgcaggcgcaacctccccgcctccatcgccgattgccggatagactcgccctgcttacggtaatccatggcaaactcgataatgaggatagcatttttggccgacaaagcgataagcaaaatcaaccctatctgactgtaaatactgatagacaaactcatgacaatacaccccagcaccgtccccaatatggcagtgggcaaactcagtatcacggctatcgggttagtccaactttcatactgggcagccagcaccagaatcacgatcaatatcgcaagtccgaagataagacctaccgtagaaccgctctggctctcttgataagcctcccccgtccaactatatccgaaattcgtacccagtgtattccggaccaatcgctccatagccgccataccctccgacgaacttatccccggagccggtatcgccgtgagtgcagccgaagaatacatattgtaccggcttactaaattcagtcccatcatctcctcgacctgtgtaaacgaagaaaacggaaccatgctaccgtcccggtttcgcacgctcagtttcatcacatcgtcgatatgagccctcgctccggcctgagcgcccaacttcacctgatagatacggccaaactccacgaaatcattcacataagccgaccccatataatacgacaaagccgagaaaacactgctgagagtaagcccctgcatttccaccttatcgcgatctatattcaatgtatattgcggggtattcccttgaaacatcgagtttatctgcatcaaggccggttcgctaccgatattcccgatcaaagcattcgctgcggattccaattcgcccgcccccaaattgctgcgatcttcgagttgcatttcaagaccgcccgaaacacccagtccgctgatagctggcggattgacggcaaacacgatagcctcttgcaaaacagatgcatcccggttcagccgctccaccacattaaacacgctatgttctttccccttccggtcgtcccagggtttcagtaccacgaaaaacgttgccgaattggacgaacttccaccctgtaacgccgaaaaacccacgatattcaaggcattttccacttcggggtacgactgtataattcgattcaaatcatcgcaaaccttgcgggtccgttccatggatgcggcattgggcaactgcaccgatacgataaaataaccttgatcttcctgtggaataaacgaagtcggccacttggcaaatccatagaaagcagccaaagccaacacgataaaagccgacaacgacaccaaaggtttacgcaacatcgagccgataactttcacatatccgttcaaagtcgctccatatcccttattaaaccacttgtacaaaaaaaacgaaggttcgcgggtcggttggagaaacaatgcgcacaaagccggagtaaacgtcagcgaattgaacccgctgaatacggtagcgacagcgatcgtcaaagcgaattgtttatacagttctcctgtgataccaccgataaaagctgtcgggataaacacggccaataacaccaataccacgccgataaccggactcgtaatctcctccatggccttctcgaccgcctccttgcgactatactttcccgtatcgataagccgggtcgaattttcgaccactacgatcgcatcgtccaccacgatagctattgccaaaacaaggccgaagagagtaagcgtattgatagaaaatcccatcaacttcatcacggcaaatgttgcgataagcgaaaccggtatggtcagagaaggaataatcattgccctgaaattttgtaagaaaataagaatgaccagcatcacgataagagaagtctccacaaacgtaaccaatacctcatcgatagatgcactcacgaattgagtcgtatcgagcaccaccttatattgcacatcgttcgggaaataacggctcaaatccatcatcttcgctttcacagcttttgccacatcgagagaattagaccccggcaactgataaatggcgatagccgccgtttctttaccgttaatagtcgatgtcgtattgtaagtcgcacttcccaaatctatggtagcgatgtcgcgcaacctcagatattccccgccgggcaacgacttgatgatgatccgtccgaactcctccggcgtagaaaggcgacctttcgaaaccaatgtaaactggaaagcctcgtccgtatccgtaggaggttgtcccacactaccggccgacacctccatattttgtgcctgaatagccgaatagacatcggccggcgtaaggctccgtatacgcatcaactccgggtcgagccagatacgcatgctgtaattatcggctccgaacaccgtcacaccgcctactcccggcaaacgggacaactcgtcggtaatgttcaacttggcataattcgacagatataaactgttatacaatggattatccgattccaacgccaagaacatgacgatgttggtagactgcttcttcgtgataattccctgttgtatgacagcctccggtaaatttccctgcgctatgttcacccgattctgtaccaacacggtcgccatatctatatcggttcccacctcgaaagtaacggtcagcgtatattgccccgacgacgaagacgacgaactcatataaatcattccgtccacaccgttcacctgctcctcgataggtacacctaccgttttcgccaccgtctcggcactcgccccgggatatacagcggtcacctgtaccgtaggaggtgttatatcgggaaactgggcgaccgggagcgtatagatggtaaccaatcccaccagcaccataacaatggcgatgaccgtagcgaaaataggcctgttaataaaaaatttcgaaatcatacccattcatttttaggaaccattaattcttttccaaaaccggacgaaccggcatgcccgctctcactttcaacaaagccttcgtaacataacgatcggtcggtgaaatcccctcgtcgatcactctcaaagtatcgttaaccaactgtcccgtctccacagggcgatattccaccacattagaatcgttcaccacatacatatacttgccaagttggtccgtggcaatagaagcatccctcaccaatatcgcatgctcgcggctaccatacggcaaccggatagagatatacaaaccactcttcaactcgccggcaggattatccacctcggcccgtatcgaaagcgtacccgtcgacaagtccacattcggcgacaaataatcgagtctaccgtaataactgcggctggtaggctcctgaaaaaggatctccacacgatcgctcggtacggaatgtttacctttactctggttcagcaacattttcaaatattgattatcctcgatattgaaataggcatacattttcttatcctgataaatagtcgccaacttcgtcgattgcaaagacccgctgatataattacccacatcgtacaaattgcgtgatatccggccctcgaacggggctttcacataacaataccccaactgtatgcgagccgtcgacaacgcagcctcggcattccgaacagaggccctactttgttccaatttcgactccgcctgtatcaaatcgatcgtactgatggcatcgctttgcgccgcctctttcattcgggtgtaattattctctgcataatcatactgtgcctgagccgttttcaacgctgcctcggcctgttccacggcatcctcgtattgcgaaggttcgataacgaaaagcaactgtcccttctttacgatctcacccggtgtataggccacctgttgcagatatccgttcacacgagctaccagatcgacggtttgtagcgaagtaaggtaacccggataactctttatcaaaaccaccgaatcgaccgccggataagccaccgatatttcgggcagccgaacatcgccactttgcttctccccctttttcgattggcaggaaaaaagcgaaaacaatacagccacagccactatcggcatataagaaaacaaacgtctcataaaatatgaattttaattttagggttgactcgaatctatccaaccgccacccagcgattgatataaaagaataagcgcattgatggcgtttccctgcgccgacacataagaattttgatacgaaagcaatgagcgctgcgcatcgagtacattttggaaccccgacaagcctcgcttatacaagtcgagcgagagcgacaacgtcttttcaccctcggccaccagctctttcaacatcgaaatttgtttgacgatatgcgtataactgttcatggcattctccacctcttggacagccgtcaacacggtttggttatactgctctatgccgctatcgagctgagccctcgccgatgccaaagcctgtatgcgctgtgtcccttgaaacaaaggccacgagaccgtaggagccaactgataggtcacactcctcttattgaaaaaatggtccatatctctggaagcgaatccgatactgccgttcaaatacaatttcggcataaaatcagacttggctgcacccaccgaagccgcatacgatgctaccgtccgttcggcctgcctcacatcaggacggcggcggagcaaattcatgggaatacctatacccactaacctctgataatcgggcaacggctttgtcgtccgaagcatcggacgcaactcatcgggatacttccccaacaaaatagcgataatattgatctgtttctctatacccgcttcaagagacggcaaagaagcctttgtattgaaataaaccgtcttggcttgcgaaacgtcgagttgcgacgccaatccggtctcgtacctcacctccgtaatatgcaggatactccgttgcgattggatattgctctcggccacgatatactgttgctgatacgtgcgcaatgtcatataagcagtcgccacttgggcacacagagacaccatcgtcccgttatattcgtcccgggaagcacggaacaactctttcttcgctttggccctctgacgtatcgaaccgaacaaatcgatttcccaactcaccgacaaatcacccgaagcatattgggaataagtgttatcggcagcctctcgccccagataaccgctattacgggtcttcgtccaaccggccgaaaaattcaccgacggatagaaaccactctgttccatacgccaagccgctctggccatacgtatgcgatcagcggccgccaacaaattatggttactgtccaccgcctcttgaatcaacgtgtcgagacaagcatcgttaaattcgctccaccataaatcctcaggaggcaactgctgcgaaaacaatgtatcgggagtccacgccttcggtatgtcgtcagacaaataacgagtagccggttgctgggcataaacagcccctccgcaaaggagaatcaataccgacgcaacaagccgacttcgaataaaaaaaactttacacataacgttaaacagcttcttaattgatttatatcgttcaatcgaaataaattttcgagacaacgcctttttcgataataaattataacggtcgtaattcgaaatagtttacaaaaatccaaactcctgcctccttccgcctttatcgaacctctcccacctgtaagagaaagcggaaaacgcttatcgagtcacaccatagaaaatcgacctcctcaaagattcagttccgaattttccttcctacgaaacaattcgctatctttatcaaaaaaatcgaatgatgacaaatgataaatacacccgtttggtaaaacttcaaaaagcattcttcaacgaacacatcacacgagaaattccattccggctatgtgctctcgaccgcttggccgaagctctcgttagtcgggaaaaacaactcggtgaagccctgcatgccgacttgggaaaatctgcattcgaaagctatgccaccgaaatcggattcctacttcacgaaatacggacgacaaaaaatcacttgcaaagctgggctcgcgaccgacatcgtcccacccccctctttcttttcggctcgaaaagtcgcattcactacgagccatacggttgtacactcatcattgccccgtggaattacccgctacaattagctttatccccccttatcggagccatagcggccggtaactgtgccatcgtcaaaccatcgggcgaagcaccccgtacggcagccgctctgcaagaacttatcgacgaatgtttcgaggaagagtacatcgccgttaccgatgccgatcgggaaaccaccgagctactcctgcaagaacgattcgattacatcttctacacaggaagtgtcgaatacgggcgtcacgtcatgcaagccgcatctcgccacctcacccccgtcacactcgaactgggaggaaaaagtccctgtatcgtcgatgacgatgccgatttgaaagccgccgcacgccgcatcgtatggggcaagttcctcaactgcggacaaacctgcgtagcccccgactacctcatggtacatcgcaaagtccaagacaaactcacagaacatattcgtgacgaaatcacccgtcaatacggcgaaaatccacaacaaagccccgattatccccgtatcgtcaatgctcggcatttcgaccgcctgtcggcgctcctctcgcacggcacgatgctttgcggaggcacaaacgatccctccgaccgatacatggcccccacgctgctcaccgacatacccccgcaatcccccctgctcaccgacgaaatcttcggccccatactccccgtactcccgttcgacgacatcgacgactgtgtcgaatacgtcaacgacagggaaaaacccctcgccctctactactttacccgcagcaaaaaacgggcacgctacatgatacaacacaccacatcgggcggagcctgtatcaacgacaccatcgtacaaaccgccaacggaaacctccccttcggaggaatcgggaacagcggaatgggagcctaccacggccgcgaaagtttcgagacattcagtcattgccgcagcatcgtcaactcctctctgcacctctatcccaatttcaaattcccgccatatgccgacaaactcaaatggcttaaacgattgatgaaataattaaccacattaaaattctactattcaaattaataatcgtataaatctcctatgattaataacgaatacctctatcattttacatcatcggaaaacttaatccgtattttagaaaccatgagtttaaaattatccgattttaaaaaacttaacgatttaaacgaaaataatataccacactactatttcatcaacggacgaagattagcccaaacgaagaattatataaagaaccactgtaagatactttgcttttctcaagactacttgtataaacatcgacttctcagcggaatcaaccatcctcgcatgtgggctcaatatgctcaaaatagcaccggagcttgtattattataaatgaaaatcttttcctaaaacaaaacgaaaatatcctaaaaacgacattctataaaatagaaaatatcgaatatacagacaagctatacaatatatcaaagcctaatcctatatacagttccccggaagaacttctaaaatgtcactacaaagacattttttataaaaaacatattgattgggaacaagaacacgaacgaagactttttattttaaatatacctgaaatacaatttttatcaataaaaaattgtattttgtacatttgcttaggatctaattttaataagtacgataaattacgtgaaacaattcataaactcgaatcaaagtgttttaaccaagacaatcatctcctatttttgagtcaatataatatggacggaaatatttccgaaggtcctttggtgaatcaactaaaatattctaattcaaaaaaaaatgaatagagggccacttctaaactcctcccttgtcgtgctccgcagcattgcggggtgtggctcataaaatcggagcagaagcgaaagagaaatacatctcaacctctccccctgtgttcctacaaggaatatagggggagtgcccatagggcgaaggggttagaatacaagcaagatcccccgattccgcctttatcgggcggtgaagtcgcaaggaagacggaggaaaaagggcgaggactgtccgagcggagcgagttccgcagaccccgacggcgaccgtagcgacgaacccaaaagcccgataaccgcggcggcgcttcttggttcgttcttctcgctgctgagaagaatgaacaaataacgcaaattagtgcaaccgagactatctttggaggggaaagaaaatcaagcattcaatccccccctgccgtgccccgtaacatggcgaggtgtcacaaaacaataaaactcaacttcatttccaaagcgggtattacccttctcccctgtgttcctacaaggaatatagggggagtgcccatagggcgaaggggttagaatacaagcaagatcccccgattccgcctttatcgggcggtgaagtcgcaagggagacggaggaaaaatgggcgaggactgtccgagcgaagcgagttccgcagaccccgacggcgaccgtagcgacgagccaaaagcccgataaccgcggcggcgcttcttggttcgttcttctcgctgctgagaagaatgaacaaataaagcgaattaatgtaacaaggactttctttgactgggaaagaaaatcattagtattcaaccttctccccctgccgtgccccgaagcattgcggggtgtggtgcaagaaaatataggggagaactgaggagcgtagcgacgaggagaggggttaaaaacacccgtagtgaaagtaatagaggtaaacctcctctccccctgtgtcgtgcaacgatatagggggagtgtccaaaggacggagggggttgaaaaaaagaggttaataaaaaagaggtgataattccggggtcgttcctctcgctactgagaaaaataaacgagaaagtataatcatgccataattccactatccccctatcctaccttcgcaaaaaaatcaaacgagcgatgatagatacaagattcgaaacgaccatagacctgagaggtgaaatcgagaactaccgacaagtagcgctcatcaaatactacaagattctcctcgaactcgacccccgtcgggacaggctcaccatgctcgccgtcattcgttgtatcgacaagctcgaaagacattcccaagagcgaaaacggccacgaaacgacaagaagaaaatgctggccgaaggaactctcgcttggcactatcagaaacgcaaccaactcttccgaaaagccggactatacgacatcgagtccacacagttcctcgtcgaccacgaagaaatcttcgacacacacgaggaacgggaagagcgcgaacgtttcgaagcctgccgtcgggaagccctcagaaggaaaaccgaaacgcacgaagccgaagaaaaagaatccgtgcaaccggcctccgctcacgaaaccgataaggacctgcaagaagactatacgacagccgggtccggaatcccggcacacaccccgcagcccttatcgcccctatccgggagcatctggtgcggcgctcctgccggtaatcccattggagaacctgcacccggattccatcgatcctctttcgattgcaacagaagagaataaatccgatgggtgaagggtgaacccaatcccctctttttccctctcgatttcgatgagcagaaacaggaagtcacccttctcccctaccatgcctcgctattttctcgtctcctctgtgttttgctaatgcaaaatatggagcgaaacgtcatgtcgtatcaaatagattcaagaccgtcaaaagcacgaattaaatccccgcctttatcgggcggtgaagtcgcaaggaagacggaggaaaaagggcgaggactgtccgagcggagcgagttccgcagaccccgacggcgactgcggcgacaaacccaaaagcccgataaccgcggcggcgcttcttggttcgtnnnnnnnnnnagggaaagaaaatcattagtattcaaccttctccccttgccgtgccccgtatgcggagtatcgcactgcaatgagcggagggttactatcaatctcctcctctgtgttttgcaccgcaaaatataggggaggtgtccgcaaggacggaggggttaataaaaacggcggcgcttcttggttcgtttttctcgctgctaagaagaatgaacaaataaagcgaattaatgtaacaaggactttctttgacagggaaagaaagtcctttgtatcacaatcctcccttgccgtgccccgaagcattgcggtgtgtggcgcaaaaaaatataggggagagctgaggagtgtagcgacgaggagagggattaaaaagaccagcaatggaagtaatagagttaaccctcctctccccctgtgtttccgtaagggaatatagggggagtgcccaaagggcgagggggttagaatacaaggaagaacccccgattccgcctttatcgggcggtgaagtcacaaggaagacggaggaaaaagggcgaggactgtccgagcgaagcgagttccgcagaccccgacggcgaccatagtgacaaacccaaaagcccgataaccgcggcggcgcttcttggttcgttcttctcgctgctgagaagaatgaacaaataaagcgaatctcatgcaaccgagactatcttttacaagaaaagaaaatcattagcattcaaccttctccccctgccgtgtcccgtagccttacggggtgttttgtagcgcaaaatataggggaggtggcacgaagtgacggaggggttaataaaaaacggaagcccttctgggttcattcttctcgctgctgagaagaatgaacaaaaaataaaactccactaccgatacagtacttgaaaagaagaaataaaacccaattctgcgataacgaaagtatgattctcaaaaaaatagataacacacagacaaaaccgaggcttgtttctattaaccctttacactatctttgcacgaagcaaaggaaaagaaaagtggaacaagattttctgaacagtctgaacgaccagcaacgcgaagctgtgctctataccgatggaccggaattggttatcgccggagccgggtcgggtaaaacaagagtacttacctacaaaatagcacacctgctgcaaatgggatatccgccctaccggctgctggcactcaccttcaccaacaaagcggccaacgaaatgaaagaacgcatcgccgcattggtagggacagagacagctcaacgcttgtgggcagggacgtttcactccattttctcccgcatactccgagccaatgccgaccggctcggctatcgtcacgacttcaccatctacgatgcctccgattccctgtcgcttataaaaagcattatcagagaacttcaactcgacgataagacatacaaacccacaaccgtgcaaacgattatttcccaggcgaaaaacgacctcaccgatccgcaagcctatgcgcgaaaccgggaacgtgtcgaatgggatactcgttcgaaacgacctttaatccataaaatatatcaacgttatcaacaacgctgttccgtgtcgggggtaatggatttcgacgacctgctgctcaataccaatatacttttcagggaccaccccgacgtgctgcaacactaccgcaacctgttcgcctacatcttggtagacgagtatcaagataccaatttcgcccaacaccacatcgtcagccagttgggaaaagaccacaaccacatctgcgtggtgggcgacgatgcccagagcatttactcgttccggggagcgaatatccacaatatactcggactgagtaaagagttcccgggattgaaaatattcaaactcgaacgaaactaccgttccactcaaaatatcgtcaatacggccaacagcctcatcgccaagaacaaggagcaaatacccaaacaagtattctccgaaaaagaacaaggaaacaaagtacaagtaataagtgcctattccgatttcgaagaaggctttatcgtctcgaaccgtattgccgaaatgcgtctcacgactcactgtgattacaacgacttcgctgtcctctatcgcacgaacgcacagtcccgtgaattggaggaagctctgcgcgagcgtaacataccctaccgcatctacggaggcatgtcgttctaccaaaggaaagaaatcaaggacgccatcgcctatttcagattgacgataaaccccgatgacgaagaagcgctcaaacgagtcatcaactatcccgcacgaggaatcggaaataccactctctcgaaactcatcgaacgggcacactcgcaggaatccagtatatggaaggtgatttccgaccccataggccacaacttggccgttaacaacggcacattgaacaagttgaaaaccttcaaggacctcatagacgaattacgctacgaagccgataaaaagaacacaccggaactggcggaaacgattatcaagcgatcgggcatttggggagagatttcctcggatcgtacccccgaaaacatcaaccggcaagagaacatcgaagaacttttgaacggtgtccgtaaattttgcgtagggcgcaaagaagccggagaagaacaaacctccctatccgacttcttggccaaaatttctctggcgacagatcaagacaacggcgatgaaaccgagcaagacaaagtaaccttaatgacggtccatgcatcgaaaggattggagttcaaacaagttttcattgttggagtagaagaagacctctttccttcggccatgagtaaaaacagtgaacgggaaatcgaagaagaacgacgtttgctctatgtggccatcacccgcgcaggagaaaactgcaccctcacgtacgccctctcccgctatcgtaacggacaaacagtcttcccttcaccaagccggttcatcaaagacctcgattctcgatacgtcgatatgccggtacaaaccaaacaagagtctcccagagaaaccatatcgtggaaccgatttccattcgatacggaaagaccgcgcaaaacttcccgatggaacgaagaagatacggatcgcacacctgcaccgagaccattcgctgctccgtctccgggcaaacgattgaccaagatagactctaaacccacaggcgaaacccattctacgacacagtccacagttacaactgctgccgggcaagtagaaataggaacattcatctgccatgcccgcttcggaaacggaaccgttacagccatagaagatacgggagacaactgcaaaataaccgtcgaatttgaaaacgtcggacgcaaacagctcctgctcaaattcgccaagttcacaatcatagaataattttcatacgtcatgcacgatacgctatcgcaaataccatcgccctgctatgttctcgaagaagaactattgcgccgcaacctcgctctcattcgctccgtcaaagaagccgccggagtaaatattatactggcgttcaaagcctatgccctttggaaatcattccccgtcatacgggaatatattccgcactccacagccagctccatacacgaagcacggctggcattcgaggagatgggcagtccggcacacacctactcaccggcctataccgagcgggatttcccgacaatactcaaatacagcagccacattaccttcaactccctgactcaattcgaacggttttacccccaagtagtagccgacggcaaccgggtatcgtgcgggttgcgtatcaaccccgaatattccgaggtagaaaccgacctctacaatccctgcgcaccgggttcccgcttaggaataaccgccgacaagctgcccgaacttccgcagggcgtggaaggacttcatttccacaccctctgcgagtccacctcctacgacctcgaaaagactttggcacaagtcgaaaaccgattcgggcatttgctcccccatatcaaatggctgaatatgggtggcggtcacctcatgacccgcaaggattacgataccgcacatttgattaacctcctccggggcttcaaacaaagacaccccggcctcgaaatcattctcgaacccggtagtgcgttcgcttggcagaccggtacattagtatccaccatagtcgatatagtcgagaaccacggtatcaaaacagccattctcgacgtctcttttgcctgtcacatgcccgactgtctcgaaatgccctataaaccggcgatacgaggctcggtagaacccgcacccggcacatacgcctatcgtatgggaggaaactcttgtctgagcggcgactatataggagactggcatttcgaccacgaattgcaaataggagaccgaatcatattcgaggatatgattcactatacgacagtcaagacaaccatgttcaacggaatcccccacccctccatagcctgcctcaaaagcgacgggaaagcggaaatctggcgggaatacgactactacgactataaaacccgaatggattgacaagacatcgatcccccggaacaaatcacaaaatacatttgttaatcgacaaaaagcataaaacaatgggaacattcttaggtatcgtagcactgctcatcacccttgtcgcatttattcccctattgggatttctcaactgggtggccatacccatatcggtcattttcctcatcatctgtgccattctcaaatcagacaatggcaaaaccctctgcatcgtatctatcgttttgggtatactgcgccttatgcttggtggagggatattctaatctcctacgagacaatgaaaactgtttacaaatcaaaggtcgataaaggcttgctaatcgccattatagcaattgtccttctgtcctacctgccgctcctgttcgaattctcttggatagccctcgccttattggtcgtcacggccgctttcattgccgacccattctgtaacacgagctacaccatagacaacggcacgctgcacatcaaatgcggcatattcttgtcgtcctccttcccgatcgaccgaataacgaaaatctcgaaaaccaatagttgtttaagcgcaccggccttatcgatggacaggatagaaatccgcttcgccgacaaaaagactctcgtcttgtctcccaaacagaggcaagcattcatcgatcatctaaggagtctcaatcccgatatagttgtaaagccacctctctgatacggaatgattcccctactctaacgtgagaaagtcggcggctaaacgaacagactccccgaatgccgtaggctgtcccggcacggtgataaagagatgcaccgtatgaggcaaaaccgtatggctcacggcaacgccgagcccggaaagtctggccgccaattccttcccctgacataaaagaatatcccgctcggcattgacgataagcgtcggcggtagctgtttcagtagctcgtcatcggctacacccggcgagacaagaggctgtcgagcatctcctgtaccgatgtatgcggcattgaaagcctccatcaattgggcatcgagaccatatccctcggcatagtttttccacgaagacgaaccgtctgcccaagcttttgtcaccggataaaacagcacgagcgaacaaagtgaagagcacatcgttccactgtccatgcggcaagagtgagaatcctttgcaagaattaggttaagagccgtagcaagagcaagattcccgcccgaactatctccgccgatagatatccgatcgggaagaaagccatactccccggcatgctcgaaagcgaatgcgacggcctcggtacaagcattgagggcggcaggataagcatgttcgggtgctaagggatattccacggccaacacagcaatctttgccctatacgataaccccgcacaaaaatgagcgcaactattgatactcccgaaacaccagccacccccatgtaagtaaatcaacacaggcaacggaatagtatcgaatccggcagggcgatacaaacgataacaccctccgatatccgctgccactaccccacttttcgattcagggttcgtattacgcgaattacgcacagatatcaaagcggtacaatccccgtttatggcgcgacgcacggcatcggcctgtgtcttttgtaaacccgcaggcaaagattgaagaaacgcacaagtctccttctccatcattacactgctctgcgctctgcctctcaatgaaaatacgataagtacggcacacatgatctttttagacacataaaaagccgtacgacaaatacccaacggttccatacattcattatccctttgattgagctatcaaagatacgcttttccacacaaaacacacctaccaacactgtaattcaatagtatttatccgtggtattctcaacacataagaaattaacagtttaaaatccaactaaattaattatgatttaatttcaaatccgtacctttgacatattaaatacagctgctgctggtaagagccgtactcctttaaggttgtgattcgctttcaaatttgcagctctggcatattaaatacggctgacggacttatcgattatgaaattctttccaagcagaaagccattgtctacatccaaaacaagcaattcatattcatttagtaattcttaaacagcatttacagctattgtaccgctccgtgattttccttatcttcgcaaaccaaatcaataaatgcaatatgaaattcaagatattagttccgttgctatgtctatgtttcctgagtagttgctatacgtcccaattagtaagtaaattctcaggcacacaagtcgaattaggtatgagccaaaatgagtttatccaaaagtttggcaaaccgtttaacaaagaaatggcttatacttacgataagcacaaaagggaaacattgttttataaagaagatttatatcggggaagttggttcatcgtcacgacagcttttacttttgtcgattccaaattggtcagccaagagattgtcagagaagaaaggcaattcaatcacgaagaacatcctcgtcgggaaaaacatcaatcttccacaacttgcccacgtcaaaatttcctcctatcttgtaccaatatttaacccgtcattcttgattttcaatattcccagcattttacacgaatattcaagaaagcgataggtgtgacaccgaatgagtctcggatataggcatggaaactgtatattaacattccctattgtatcaatttggaaacaaagtagttagcattaatttaaccccattcgatacacaaacatttgccttgacgacgtagtatttagccaaagtttgcacctcatcgttgtgagtcactttcaaatttgtacctttgacatattaaatacagccgtcttttgccgctatagcgatgaagcggagttgtgattcgctttcaaatttgtatctttgacatattaaatacagcttccgtatttcaagtggaatgacgacggtgttgtgattcgctttcaaatttgtatctttgacatattaaatacagcccgccacaacataagaagatatttaaactcgttgtgattcgctttcaaatttgtatctttgacatattaaatacagccagatagtgttgggccacatgatggaccttgttgtgattcgctttcaaatttgtatctttgacatattaaatacagcagcggggccgtttttttatcctcgctcaatgttgtgattcgctttcaaatttgtatctttgacatattaaatacagcggctttgtcggcgaactacctcgcctgtctgttgtgattcgctttcaaatttgtatctttgacatattaaatacagcctgtcgaattcgatacacaagaagaagcacgttgtgattcgctttcaaatttgtatctttgacatattaaatacagctctacccttgacggggcagctatttttatgagttgtgattcgctttcaaatttgtatctttgacatattaaatacagcttcacatagcttttgattgtccctaagttgttgtgattcgctttcaaatttgtatctttgacatattaaatacagctaagagtcatatacaggaatggatttcagggttgtgattcgctttcaaatttgtatctttgacatattaaatacagctttgacctaatttgttatttcctctacaaggttgtgattcgctttcaaatttgtatctttgacatattaaatacagcgatcgaattctttttcagtgagaccggtttgttgtgattcgctttcaaatttgtatctttgacatattaaatacagctgcgagtgggcggtttccagaatgaaggccgttgtgattcgctttcaaatttgtatctttgacatattaaatacagcctcctgtccacggagcctaagtactattagttgtgattcgctttcaaatttgtatctttgacatattaaatacagcgatgggcaatgcgatttatggttatagatagttgtgattcgctttcaaatttgtatctttgacatattaaatacagcaaaaagaatgatacaccctagttcgcttgtgttgtgattcgctttcaaatttgtatctttgacatattaaatacagcacagccacatcgaacgccaacacagcggcggttgtgattcgctttcaaatttgtatctttgacatattaaatacagcgctcaaagcacagagacgcattcgtgggctgttgtgattcgctttcaaatttgtatctttgacatattaaatacagcccaatttgtatagtcatttaatagtcaaacaattacacaaccaattagaattaaaaattaaagttgtatttcatcaaaaagccggttaaaaaaccggctttttgtttttcaaaagagttcgagctgttgaggtagaacctgtggctttacctctttcttcccatagaaaatttccatcataccgaattgtttatcagtaacacagagaatacctacttttccaaacggcggtaaagaaagcttcacccggcggatatgtacatcggcattctcccgactaggacaatgccgtacataaatggaaaattgaaacatagtaaatccatcttgcaacagtttcttacggaagtcggcatataatttacgttcccgtttcgactctgttggcaaatcgaaaaataccaatacccacataatacgatattcgctgaatctatccatattaattataattctggatagatgattttacgtaactccccgttaaaacatttgtataaagaggcggtagtttgggcgactgcgaccatcaaaggactacgccgcccttgaatacctacctctaccaccggtaaagacaataactttgctttcaattcggtcgttaacatcgaatagtcttttccactttccatgatttcacagaccaagccatcgacataggggcgataaggctccatcacatcatcggccaaacaatatgcattataacggttatgatgatgtatgcccaaagtaggtaacaatccactaataacgagcgaccgggcgacaacagcccgaagaatagcatagccataattgagtagattgttggggggatcgccgtctctgtctctgcgaaaactatcgaggtgagggaatatactcgaccaataataggcggcagcccgtgcttccatattatcgatgtctccgctacggacttcgcccacccatgcccgcatatttttggctacaattccccggctctccaaaattgcagcttgattggcaatcttttgctgcactgtctgttgccaaagttgctttttcaaaggtaacgaagcattaagttggtctcggaaccgttcgttttgtgtcgtgttcccacaaaggggtagtacgagtcccacaggcaaacgacttttatcgcaagtgataatagcgcaattattttcgagaagggcttcgagcaatccttgcgtgatcgttatctgcgaatgatcgagtacgaccactcctatatcttcgacaggaatcgtccgctctgcctcttttttgaaagtatcgggtaatgtgtcgttattcgacacttctggcagacgcaataccagctgtgcattgcgcaaactcagatacgaaggattcccaaaatataatgtgcgtttgatcataccgctttcccatttatggatattagcattcccaatctatcaacctttatggggatacaactctcttttatcatttcatcggttctggctcgttctgacttattgttactaccgagctctattttttgaagaacaggtgcggcaacaaaagcaggcacaaaaaagacttgataccccgtgcagcttaccatcttatatattctatttctatctaacggttgacttattgaatcagtttctgactcctctttggttggcaaatagaccaaatcattcggagacaatataaatgccggaggatttccattttcatcattaggagcaatacttaatccttgtttcaaattacgaataacatcattcaacggaatagtcttaaaagttcgctctttatggcactctccacgatcgttctccacttctttctcataaacagcaaaatacaaattggtgccttttgctgcctcaacaaatttcttggacttatttcctactgagcctaacgggaatttcatcgtactacactcatatatacgcaccttatatataggcttatgatctttcccattattcaatgtctttattgttctgttcatttcatctataccttctggggagaatgcaagtaccggatcattacctttattttcaagatgcctaaacagaatcttttgaatacctgtatcggttatgctttctattatttttttagctttctcaaaattggaaaccccactaaacaaactaataagatcgtttccaaaacgagttgcaaaataacgatttttaggtaattctgtttgaggatctactatctcacgagaataataacgcacctctattttcgacagattcacatcttgccaaacatctttattatcctcgaaatatttttttattcgcttagtatcatagcctttactctgcaactctaatatttttgaccttaaatctttttctacaattctctttggatttgtcaatgcttccctcaacgaaacaaatctagttctccataaaaacacctctcccgaaacggtctctttatgtaaaggcttccttatcgaccaatgatcggcagacttttgttctttccattctttttcggaggaattatctttccaatgttggaaataattgactgttttgttcaacactctcagattctggcgaaagctcactatcacattttttaaagcgaactcaacatctcttgtaaattcttcccacggttttagaaattctttcggtacttcccgttcttttagtttcccatcttgtttgtacgacacattctcatatctacgtaattttcttgacaattgatgcttattagcattattttgagtatttgagcattcgttattcaataaattcacatgatcacgagtggtacaagctatgacaatagcatccatagcatgatgtctatggtctatgcgttttttattgaaacctttttgatacatcaatggcatactcggaatcaaatgtccttcctgattaaaggctgtaaatttttcaccattatctgctcttatttcctctaaccgcacaaagcgaggcaaaataatatgattccatacatcattcacaccccaatcttttttcaatctatcggtaatcgcaccgttgcaagagattacattcttagaaacagattcttgttcatcatcttcacgcacaatattggataatagattccgaatatatttgcttatataccggctgtcattcaactgtcgatgactaaattcagtaggaatatcctcggccaaaagacgttgcattttctgcttattacttttataatgctcttttacgaaatcttcatattcttctaccgaaaagattctcacgttccgtcctccgcttaattctacaatttcgccacctttttctttaacaaactcatatcccaacaaatcgcctttcttggcattgacttcggcctcacatataaccttgttggtaaatgaatcatcaaagaaacgagcttgcggaattatatgttctatctgataggctggtgtgaacaattttcctaatggtattatttcgcctgtatagggagaacgatacttttgctctaaccaacatttataacgaattatttcgttcttggtcggacgctttccctcttcactttcattgaattttttcagtatattctttatttcatcttctatttcagaaacactgctcaacactccatcttcatagatacgcaaaatttcttgttgtgcaggagaatatggacgaacattttcaattccaagttccgggttcataaattcatggagtaacgctttgatgcgtaaattgtcattttcattcctactgataatagcactgcgtcttgcccgttcttgggctgtttgtttcatatccctccccatttcgatatgaatttcgtctatggaacctactcgtctccaaatgtcccgaactacacgaagtgtttccataatcacttgttcaactataggattacgtaacgtgtgttgtttaaactctttcaagaatttatcaatatcttcagggccattccactttttaattgttttaagttccgaatggcgatcataaacgatataacaagcgagccacagtggtaaccctttgaattgagaaatatcggtaagagaaattgatttttctcttgttcttgctctgatagtctcgtcacactctccattaagaatcttttcgatacgctcctttgtatgattatcaatagattctaaattccaatattttcctcttcgcatcaaaggcagcaacttgccaatagcctttgccgaatacgagccatacccactttccagtttcacattttttattttctgtatcgtctcatcggaaaaatatacactcaatccagaataaatcccttttgttgacacatttttcgaactaagagctttatctatctcagactgtgctgaaacggaataaagcaagtgccatatttttaattctatatcttccgaaagagcttctttttcatcgttcaataactttttcaaaatagaactacgagttttattaccgggatattttttatcctctacataattccatcgatataaagacaccgtatcttccgtcttcgtctttttaaggcctaaatgcttcaacaaatcttcttgcgaaacctctgcccgttcattaagccatttgaacaattccacataagcgctttcatctctcaaaaaatcacttgttacatcaacgttaaactgcaatttgccgtccacctctttcactttttgataaatccttaaattggaaataaactgccatatccgaaattcttggaacagaggatgggattttgcaatacatttccttggtttactttttttctccccattttctatataaaaggattcttcatacgggcaattatcaatcaaagcctttttgcttttcaatggtcgttgataaaacaatatgtcttttatgaataacgaagtaaaatcccaagttccaataactcttttatgtgcctcatttttacaataaagcaattctatacattgatgatacaattccctatcttgtaattcaagatggaattttttttgattttccaaaattagagataactcgtttgtatagttttctcgttctatggttcgaattaattttcctttaattttttgatctggcttttgtaataacgtatcataaatataagtccccactgttttaccagatgatttaatatctacttctgtcttctttttgactaacatccaatcttctggtttcgggatactaaaagaacgcttcacctttccttctttatcaatctgaggactcccgttattatcgagagttgtcgttacgataaactctttaacttgcccttcccactcatcaatgggaacactgctagccctacgatatacccaataatcatccgtatctcccaaaccactctctaaatacacattataccatgtgtcctttccctttttctctcctgtgtcttccactcgaacaactttcaaggcataaaattctatttttttaccctgaacttcttcatcttctccacgaagttgaaaatagcctcgcttttgattaaaatttaagagtatccatgccagctcttctttggagatcttctcagtcaaagcttttttacggagatagtaaattgtccaatcataaggcactttacgtccatctaacaataattgcggttgtgagtgtctaaaatcttccaacatttcattaaacgaatctaaaaaaataaattcgttctttcccatcttatcttttttccatgaaagttttacctcattatcaagaaagaatttaccatatttatcaatattttgagaataatgttctggcaaaaatcccatacaattcagcactcttaacaacctttctcttctcaataaatacctttccctcaatcttctagcacttcggtaacctgttctttctcttgtttgagacacagaatttccgttttcaaaattgcccaaagttgcttgatccataggaataatcctacttcctgcaagatctatgctttgtaagatttcctttccatcttcatttttcaatgcttttacaatagcccaacctatactattcgagcctaaatccaatcccaaaatgtttttcatgcctactatatattttatggtattattatatttaatatgtaaacataaaaaaatttatcgaaaaatacaatagtataaaaatttatatgtatatttgtcaacacaaatttgaaagcaaatcacaataaggattattccgttgtgaaaacatttggaagggggagtattcatactcctcgttcttttttatatatctctattttatcaaaaactttttaagaatatctccgtccctaacccaaaatcccattcgcaaaattataatcactgctgtcatacccttctccaaacgatttcctttaatagtgtaaaaaggatattaatctatatattagatattatcaaaggattatgaaccgaaaatcaggggtatggagtggcgtcggggacgacggggcgagggtaaaaactgttaatgtgatactttcaatcctctccctctgctcatcgtagatgagatagggggagtgcccgcagggcgagggggttgaactctacaaccaaatgatctttttcaacccttctccttagaaactattgtttcttcggtgtctcctctatatggctaacatagtaccccgtaatactataagagttaacccctccgtcactacgtgacacctcccctatatttttgcgttgcaaaaacacagtggaggaggaagagcggcatttcttgtttcagaataagaatggctttgtacacctctcccctgccatgtcccgtagcattacggggtatcgcaacttaaaatcgaaacagtcgccgtcggggtctgcggaactcgctccgctcggacagtcctcgccctttttcctccgtcttccttgcgacttcaccgcccgataaaggcggaatcgggggatcttgcttgtattctaaccccttcgccctatgggcactccccctatattccttgtaggaacacaggggagccgccaacttatagaagagagagccggagagggagaaccccttcggctttctctctttttgtatataggactcgcaactacccccggtcctatccaaaagtcggagaagttcaacctaaccggaggcgtttcacttcatcgttagcggattaaaccccacccctaatctatatattagatattatcaaaggattatgaaccgaaaatcaggggtatggagtggcgtcggggacgacggggcgagctctcagggacgggagtttctgaggggtggggtttaatccgctaacgatgaagtgaaacgcctccggttaggttgaacttctccgacttttggataggaccg
